United States Patent Application Publication US 2026/0275385 A1, published September 17, 2026 (application 18/849,329).

The application's sequence listing, which the Patent Office published only in electronic form, follows.

SEQUENCE LISTING (24457 sequences)

SEQ ID NO: 1 - protein, 323 aa, synthetic construct
MWPLVAALLLGSACCGSAQLLFNKTKSVEFTFCNDTVVIPCFVTNMEAQNTTEVYVKWKFKGRDIYTFDGALNKSTVPTDFSSAKIEVSQLLKGDASLKMDKSDAVSHTGNYTCEVTELTREGETIIELKYRVVSWFSPNENILIVIFPIFAILLFWGQFGIKTLKYRSGGMDEKTIALLVAGLVITVIVIVGAILFVPGEYSLKNATGLGLIVTSTGILILLHYYVFSTAIGLTSFVIAILVIQVIAYILAVVGLSLCIAACIPMHGPLLISGLSILALAQLLGLVYMKFVASNQKTIQPPRKAVEEPLNAFKESKGMMNDE

SEQ ID NO: 2 - protein, 305 aa, synthetic construct
MWPLVAALLLGSACCGSAQLLFNKTKSVEFTFCNDTVVIPCFVTNMEAQNTTEVYVKWKFKGRDIYTFDGALNKSTVPTDFSSAKIEVSQLLKGDASLKMDKSDAVSHTGNYTCEVTELTREGETIIELKYRVVSWFSPNENILIVIFPIFAILLFWGQFGIKTLKYRSGGMDEKTIALLVAGLVITVIVIVGAILFVPGEYSLKNATGLGLIVTSTGILILLHYYVFSTAIGLTSFVIAILVIQVIAYILAVVGLSLCIAACIPMHGPLLISGLSILALAQLLGLVYMKFVASNQKTIQPPRNN

SEQ ID NO: 3 - RNA, 972 nt, synthetic construct
  source 1..972: mol_type = other RNA
atgtggcccctggtagcggcgctgttgctgggctcggcgtgctgcggatcagctcagctactatttaataaaacaaaatctgtagaattcacgttttgtaatgacactgtcgtcattccatgctttgttactaatatggaggcacaaaacactactgaagtatacgtaaagtggaaatttaaaggaagagatatttacacctttgatggagctctaaacaagtccactgtccccactgactttagtagtgcaaaaattgaagtctcacaattactaaaaggagatgcctctttgaagatggataagagtgatgctgtctcacacacaggaaactacacttgtgaagtaacagaattaaccagagaaggtgaaacgatcatcgagctaaaatatcgtgttgtttcatggttttctccaaatgaaaatattcttattgttattttcccaatttttgctatactcctgttctggggacagtttggtattaaaacacttaaatatagatccggtggtatggatgagaaaacaattgctttacttgttgctggactagtgatcactgtcattgtcattgttggagccattcttttcgtcccaggtgaatattcattaaagaatgctactggccttggtttaattgtgacttctacagggatattaatattacttcactactatgtgtttagtacagcgattggattaacctccttcgtcattgccatattggttattcaggtgatagcctatatcctcgctgtggttggactgagtctctgtattgcggcgtgtataccaatgcatggccctcttctgatttcaggtttgagtatcttagctctagcacaattacttggactagtttatatgaaatttgtggcttccaatcagaagactatacaacctcctaggaaagctgtagaggaaccccttaatgcattcaaagaatcaaaaggaatgatgaatgatgaataa

SEQ ID NO: 4 - RNA, 918 nt, synthetic construct
  source 1..918: mol_type = other RNA
atgtggcccctggtagcggcgctgttgctgggctcggcgtgctgcggatcagctcagctactatttaataaaacaaaatctgtagaattcacgttttgtaatgacactgtcgtcattccatgctttgttactaatatggaggcacaaaacactactgaagtatacgtaaagtggaaatttaaaggaagagatatttacacctttgatggagctctaaacaagtccactgtccccactgactttagtagtgcaaaaattgaagtctcacaattactaaaaggagatgcctctttgaagatggataagagtgatgctgtctcacacacaggaaactacacttgtgaagtaacagaattaaccagagaaggtgaaacgatcatcgagctaaaatatcgtgttgtttcatggttttctccaaatgaaaatattcttattgttattttcccaatttttgctatactcctgttctggggacagtttggtattaaaacacttaaatatagatccggtggtatggatgagaaaacaattgctttacttgttgctggactagtgatcactgtcattgtcattgttggagccattcttttcgtcccaggtgaatattcattaaagaatgctactggccttggtttaattgtgacttctacagggatattaatattacttcactactatgtgtttagtacagcgattggattaacctccttcgtcattgccatattggttattcaggtgatagcctatatcctcgctgtggttggactgagtctctgtattgcggcgtgtataccaatgcatggccctcttctgatttcaggtttgagtatcttagctctagcacaattacttggactagtttatatgaaatttgtggcttccaatcagaagactatacaacctcctaggaataactga

SEQ ID NO: 5 - DNA, 969 bp, synthetic construct
  source 1..969: mol_type = other DNA
atgtggcccctggtcgccgccctgttgctgggctcggcatgctgcggatcagctcagctactgtttaataaaacaaaatctgtagaattcacgttttgtaacgacactgtcgtgatcccatgctttgttactaatatggaggcacaaaacaccactgaagtgtacgtgaagtggaaattcaaaggcagagacatttacacctttgacggcgccctcaacaagtccaccgtgcccactgactttagtagcgcaaaaattgaggtcagccaattactaaaaggagatgcctctttgaagatggacaagagcgatgctgtcagccacacagggaactacacttgtgaagtaacagagttaacccgcgaaggtgaaacgatcatcgagctgaagtatcgagtggtgtcctggttttctccgaacgagaatatccttatcgtaattttcccaattttcgctatcctcctgttctggggccagtttggtatcaagacactcaaatatcggtccggtgggatggatgagaagacaattgccctgcttgttgctggactcgtgatcaccgtcatcgtgattgttggggccatccttttcgtcccaggggagtacagcctgaagaatgctacgggcctgggattaattgtgacctctacagggatactcatcctgcttcactactatgtgttcagtaccgcgattggactgacctccttcgtcattgccatattggtgattcaggtgatagcctacatcctcgccgtggttggcctgagtctctgtatcgcggcgtgcatacccatgcatggccctcttctgatttcagggttgagtatcctcgcactagcacagttgctgggactggtttatatgaaatttgtggcctccaaccagaagactatacagcctcctaggaaggctgtagaggagcccctgaatgcattcaaggaatcaaaaggcatgatgaatgatgaa

SEQ ID NO: 6 - protein, 18 aa, synthetic construct
  SITE 1: note = E is attached to (GSG) Linker
EGRGSLLTCGDVEENPGP

SEQ ID NO: 7 - protein, 19 aa, synthetic construct
  SITE 1: note = A is attached to (GSG) Linker
ATNFSLLKQAGDVEENPGP

SEQ ID NO: 8 - protein, 20 aa, synthetic construct
  SITE 1: note = Q is attached to (GSG) Linker
QCTNYALLKLAGDVESNPGP

SEQ ID NO: 9 - protein, 22 aa, synthetic construct
  SITE 1: note = V is attached to (GSG) Linker
VKQTLNFDLLKLAGDVESNPGP

SEQ ID NO: 10 - protein, 4 aa, synthetic construct
  SITE 4: note = R is attached to (GSG) Linker
RRRR

SEQ ID NO: 11 - protein, 4 aa, synthetic construct
  SITE 4: note = R is attached to (GSG) Linker
RKRR

SEQ ID NO: 12 - protein, 9 aa, synthetic construct
  SITE 4: note = R is attached to (GSG) Linker
  SITE 9: note = W is attached to (GSG) Linker
RKRRTPDPW

SEQ ID NO: 13 - protein, 507 aa, synthetic construct
MEPAGPAPGRLGPLLCLLLAASCAWSGVAGEEELQVIQPDKSVSVAAGESAILHCTVTSLIPVGPIQWFRGAGPARELIYNQKEGHFPRVTTVSESTKRENMDFSISISNITPADAGTYYCVKFRKGSPDTEFKSGAGTELSVRAKPSAPVVSGPAARATPQHTVSFTCESHGFSPRDITLKWFKNGNELSDFQTNVDPVGESVSYSIHSTAKVVLTREDVHSQVICEVAHVTLQGDPLRGTANLSETIRVPPTLEVTQQPVRAENQVNVTCQVRKFYPQRLQLTWLENGNVSRTETASTVTENKDGTYNWMSWLLVNVSAHRDDVKLTCQVEHDGQPAVSKSHDLKVSAHPKEQGSNTAAENTGSNERNIYIVVGVVCTLLVALLMAALYLVRIRQKKAQGSTSSTRLHEPEKNAREITQVQSLDTNDITYADLNLPKGKKPAPQAAEPNNHTEYASIQTSPQPASEDTLTYADLDMVHLNRTPKQPAPKPEPSFSEYASVQVPRK

SEQ ID NO: 14 - protein, 330 aa, synthetic construct [sequence omitted]

SEQ ID NO: 15 - protein, 327 aa, synthetic construct
ASTKGPSVFPLAPCSRSTSESTAALGCLVKDYFPEPVTVSWNSGALTSGVHTFPAVLQSSGLYSLSSVVTVPSSSLGTKTYTCNVDHKPSNTKVDKRVESKYGPPCPSCPAPEFLGGPSVFLFPPKPKDTLMISRTPEVTCVVVDVSQEDPEVQFNWYVDGVEVHNAKTKPREEQFNSTYRVVSVLTVLHQDWLNGKEYKCKVSNKGLPSSIEKTISKAKGQPREPQVYTLPPSQEEMTKNQVSLTCLVKGFYPSDIAVEWESNGQPENNYKTTPPVLDSDGSFFLYSRLTVDKSRWQEGNVFSCSVMHEALHNHYTQKSLSLSLGK

SEQ ID NO: 16 - protein, 327 aa, synthetic construct
ASFKGPSVFPLVPCSRSTSESTAALGCLVKDYFPEPVTVSWNSCALTSGVHTFPAVLQSSGLYSLSSVVTVPSSSLGTKTYTCNVDHKPSNTKVDKRVESKYGPPCPSCPAPEFLGGPSVFLFPPKPKDTLMISRTPEVTCVVVDVSQEDPEVQFNWYVDGVEVHNAKTKPREEQFNSTYRVVRVLTVLHQDWLNGKEYKCKVSNKGLPSSIEKTISKAKGQPREPQVYTLPPSQEEMTKNQVSLTCLVKGFYPSDIAVEWESNGQPEDNYKTTPPVLDSDGSFFLYSRLTVDKSRWQEGNVFSCSVMHEALHNHYTQKSLSLSPGK

SEQ ID NO: 17 - protein, 345 aa, synthetic construct
EEELQVIQPDKSVSVAAGESAILHCTVTSLIPVGPIQWFRGAGPARELIYNQKEGHFPRVTTVSESTKRENMDFSISISNITPADAGTYYCVKFRKGSPDTEFKSGAGTELSVRAKPSDKTHTCPPCPAPELLGGPSVFLFPPKPKDTLMISRTPEVTCVVVDVSHEDPEVKFNWYVDGVEVHNAKTKPREEQYNSTYRVVSVLTVLHQDWLNGKEYKCKVSNKALPAPIEKTISKAKGQPREPQVYTLPPSRDELTKNQVSLTCLVKGFYPSDIAVEWESNGQPENNYKTTPPVLDSDGSFFLYSKLTVDKSRWQQGNVFSCSVMHEALHNHYTQKSLSLSPGK

SEQ ID NO: 18 - protein, 347 aa, synthetic construct
EEELQVIQPDKSVSVAAGESAILHCTVTSLIPVGPIQWFRGAGPARELIYNQKEGHFPRVTTVSESTKRENMDFSISISNITPADAGTYYCVKFRKGSPDTEFKSGAGTELSVRAKPSESKYGPPCPPCPAPEFLGGPSVFLFPPKPKDTLMISRTPEVTCVVVDVSQEDPEVQFNWYVDGVEVHNAKTKPREEQFNSTYRVVSVLTVLHQDWLNGKEYKCKVSNKGLPSSIEKTISKAKGQPREPQVYTLPPSQEEMTKNQVSLTCLVKGFYPSDIAVEWESNGQPENNYKTTPPVLDSDGSFFLYSRLTVDKSRWQEGNVFSCSVMHEALHNHYTQKSLSLSLGK

SEQ ID NO: 19 - RNA, 20 nt, synthetic construct
  source 1..20: mol_type = other RNA
cgtgagtaaacctgaatctt

SEQ ID NO: 20 - RNA, 20 nt, synthetic construct
  source 1..20: mol_type = other RNA
gatattggcataagcctccc

SEQ ID NO: 21 - skipped

SEQ ID NO: 22 - RNA, 12 nt, synthetic construct
  source 1..12: mol_type = other RNA
gttttagagcta

SEQ ID NO: 23 - skipped

SEQ ID NO: 24 - RNA, 66 nt, synthetic construct
  source 1..66: mol_type = other RNA
tagcaagttaaaataaggctagtccgttatcaacttgaaaaagtggcaccgagtcggtgctttttt

SEQ ID NO: 25 - skipped

SEQ ID NO: 26 - RNA, 17 nt, synthetic construct
  source 1..17: mol_type = other RNA
gtttsagagctatgctg

SEQ ID NO: 27 - skipped

SEQ ID NO: 28 - RNA, 71 nt, synthetic construct
  source 1..71: mol_type = other RNA
cagcatagcaagttsaaataaggctagtccgttatcaacttgaaaaagtggcaccgagtcggtgctttttt

SEQ ID NO: 29 - skipped

SEQ ID NO: 30 - RNA, 14 nt, synthetic construct
  source 1..14: mol_type = other RNA
gttttagtactctg

SEQ ID NO: 31 - skipped

SEQ ID NO: 32 - RNA, 64 nt, synthetic construct
  source 1..64: mol_type = other RNA
cagaatctactaaaacaaggcaaaatgccgtgtttatctcgtcaacttgttggcgagatttttt

SEQ ID NO: 33 - RNA, 88 nt, synthetic construct
  source 1..88: mol_type = other RNA
gtcgtctataggacggcgaggacaacgggaagtgccaatgtgctctttccaagagcaaacaccccgttggcttcaagatgaccgctcg

SEQ ID NO: 34 - skipped

SEQ ID NO: 35 - RNA, 23 nt, synthetic construct
  source 1..23: mol_type = other RNA
cgagcggtctgagaagtggcact

SEQ ID NO: 36 - skipped

SEQ ID NO: 37 - RNA, 21 nt, synthetic construct
  source 1..21: mol_type = other RNA
gctgtgctcgcgctactctct

SEQ ID NO: 38 - RNA, 21 nt, synthetic construct
  source 1..21: mol_type = other RNA
ctggcctggaggctatccagc

SEQ ID NO: 39 - RNA, 21 nt, synthetic construct
  source 1..21: mol_type = other RNA
tggcctggaggctatccagcg

SEQ ID NO: 40 - RNA, 21 nt, synthetic construct
  source 1..21: mol_type = other RNA
cccgatattcctcaggtactc

SEQ ID NO: 41 - RNA, 21 nt, synthetic construct
  source 1..21: mol_type = other RNA
ccgatattcctcaggtactcc

SEQ ID NO: 42 - RNA, 21 nt, synthetic construct
  source 1..21: mol_type = other RNA
cattctctgctggatgacgtg

SEQ ID NO: 43 - RNA, 21 nt, synthetic construct
  source 1..21: mol_type = other RNA
ccattctctgctggatgacgt

SEQ ID NO: 44 - RNA, 21 nt, synthetic construct
  source 1..21: mol_type = other RNA
actttccattctctgctggat

SEQ ID NO: 45 - RNA, 21 nt, synthetic construct
  source 1..21: mol_type = other RNA
ctcacgtcatccagcagagaa

SEQ ID NO: 46 - RNA, 21 nt, synthetic construct
  source 1..21: mol_type = other RNA
ctgaattgctatgtgtctggg

SEQ ID NO: 47 - RNA, 21 nt, synthetic construct
  source 1..21: mol_type = other RNA
aatgtcggatggatgaaaccc

SEQ ID NO: 48 - RNA, 21 nt, synthetic construct
  source 1..21: mol_type = other RNA
agtaagtcaacttcaatgtcg

SEQ ID NO: 49 - RNA, 21 nt, synthetic construct
  source 1..21: mol_type = other RNA
atccatccgacattgaagttg

SEQ ID NO: 50 - RNA, 21 nt, synthetic construct
  source 1..21: mol_type = other RNA
aattctctctccattcttcag

SEQ ID NO: 51 - RNA, 21 nt, synthetic construct
  source 1..21: mol_type = other RNA
caattctctctccattcttca

SEQ ID NO: 52 - RNA, 21 nt, synthetic construct
  source 1..21: mol_type = other RNA
tcaattctctctccattcttc

SEQ ID NO: 53 - RNA, 21 nt, synthetic construct
  source 1..21: mol_type = other RNA
ttcaattctctctccattctt

SEQ ID NO: 54 - RNA, 21 nt, synthetic construct
  source 1..21: mol_type = other RNA
ctgaagaatggagagagaatt

SEQ ID NO: 55 - RNA, 21 nt, synthetic construct
  source 1..21: mol_type = other RNA
ctgaaagacaagtctgaatgc

SEQ ID NO: 56 - RNA, 21 nt, synthetic construct
  source 1..21: mol_type = other RNA
tctttcagcaaggactggtct

SEQ ID NO: 57 - RNA, 21 nt, synthetic construct
  source 1..21: mol_type = other RNA
cagcaaggactggtctttcta

SEQ ID NO: 58 - RNA, 21 nt, synthetic construct
  source 1..21: mol_type = other RNA
agcaaggactggtctttctat

SEQ ID NO: 59 - RNA, 21 nt, synthetic construct
  source 1..21: mol_type = other RNA
agtgggggtgaattcagtgta

SEQ ID NO: 60 - RNA, 21 nt, synthetic construct
  source 1..21: mol_type = other RNA
cagtgggggtgaattcagtgt

SEQ ID NO: 61 - RNA, 21 nt, synthetic construct
  source 1..21: mol_type = other RNA
tcagtgggggtgaattcagtg

SEQ ID NO: 62 - RNA, 21 nt, synthetic construct
  source 1..21: mol_type = other RNA
ttcagtgggggtgaattcagt

SEQ ID NO: 63 - RNA, 21 nt, synthetic construct
  source 1..21: mol_type = other RNA
ctatctcttgtactacactga

SEQ ID NO: 64 - RNA, 21 nt, synthetic construct
  source 1..21: mol_type = other RNA
tatctcttgtactacactgaa

SEQ ID NO: 65 - RNA, 21 nt, synthetic construct
  source 1..21: mol_type = other RNA
tactacactgaattcaccccc

SEQ ID NO: 66 - RNA, 21 nt, synthetic construct
  source 1..21: mol_type = other RNA
ggctgtgacaaagtcacatgg

SEQ ID NO: 67 - RNA, 21 nt, synthetic construct
  source 1..21: mol_type = other RNA
actatcttgggctgtgacaaa

SEQ ID NO: 68 - RNA, 21 nt, synthetic construct
  source 1..21: mol_type = other RNA
ccccacttaactatcttgggc

SEQ ID NO: 69 - RNA, 21 nt, synthetic construct
  source 1..21: mol_type = other RNA
gtcacagcccaagatagttaa

SEQ ID NO: 70 - RNA, 21 nt, synthetic construct
  source 1..21: mol_type = other RNA
tcacagcccaagatagttaag

SEQ ID NO: 71 - RNA, 21 nt, synthetic construct
  source 1..21: mol_type = other RNA
cctccatgatgctgcttacat

SEQ ID NO: 72 - RNA, 21 nt, synthetic construct
  source 1..21: mol_type = other RNA
ttcatagatcgagacatgtaa

SEQ ID NO: 73 - RNA, 21 nt, synthetic construct
  source 1..21: mol_type = other RNA
tcatagatcgagacatgtaag

SEQ ID NO: 74 - RNA, 21 nt, synthetic construct
  source 1..21: mol_type = other RNA
catagatcgagacatgtaagc

SEQ ID NO: 75 - RNA, 21 nt, synthetic construct
  source 1..21: mol_type = other RNA
atagatcgagacatgtaagca

SEQ ID NO: 76 - RNA, 56 nt, synthetic construct
  source 1..56: mol_type = other RNA
gtcaaaagacctttttaatttctactcttgtagatgctgtgctcgcgctactctct

SEQ ID NO: 77 - RNA, 56 nt, synthetic construct
  source 1..56: mol_type = other RNA
gtcaaaagacctttttaatttctactcttgtagatctggcctggaggctatccagc

SEQ ID NO: 78 - RNA, 56 nt, synthetic construct
  source 1..56: mol_type = other RNA
gtcaaaagacctttttaatttctactcttgtagattggcctggaggctatccagcg

SEQ ID NO: 79 - RNA, 56 nt, synthetic construct
  source 1..56: mol_type = other RNA
gtcaaaagacctttttaatttctactcttgtagatcccgatattcctcaggtactc

SEQ ID NO: 80 - RNA, 56 nt, synthetic construct
  source 1..56: mol_type = other RNA
gtcaaaagacctttttaatttctactcttgtagatccgatattcctcaggtactcc

SEQ ID NO: 81 - RNA, 56 nt, synthetic construct
  source 1..56: mol_type = other RNA
gtcaaaagacctttttaatttctactcttgtagatcattctctgctggatgacgtg

SEQ ID NO: 82 - RNA, 56 nt, synthetic construct
  source 1..56: mol_type = other RNA
gtcaaaagacctttttaatttctactcttgtagatccattctctgctggatgacgt

SEQ ID NO: 83 - RNA, 56 nt, synthetic construct
  source 1..56: mol_type = other RNA
gtcaaaagacctttttaatttctactcttgtagatactttccattctctgctggat

SEQ ID NO: 84 - RNA, 56 nt, synthetic construct
  source 1..56: mol_type = other RNA
gtcaaaagacctttttaatttctactcttgtagatctcacgtcatccagcagagaa

SEQ ID NO: 85 - RNA, 56 nt, synthetic construct
  source 1..56: mol_type = other RNA
gtcaaaagacctttttaatttctactcttgtagatctgaattgctatgtgtctggg

SEQ ID NO: 86 - RNA, 56 nt, synthetic construct
  source 1..56: mol_type = other RNA
gtcaaaagacctttttaatttctactcttgtagataatgtcggatggatgaaaccc

SEQ ID NO: 87 - RNA, 56 nt, synthetic construct
  source 1..56: mol_type = other RNA
gtcaaaagacctttttaatttctactcttgtagatagtaagtcaacttcaatgtcg

SEQ ID NO: 88 - RNA, 56 nt, synthetic construct
  source 1..56: mol_type = other RNA
gtcaaaagacctttttaatttctactcttgtagatatccatccgacattgaagttg

SEQ ID NO: 89 - RNA, 56 nt, synthetic construct
  source 1..56: mol_type = other RNA
gtcaaaagacctttttaatttctactcttgtagataattctctctccattcttcag

SEQ ID NO: 90 - RNA, 56 nt, synthetic construct
  source 1..56: mol_type = other RNA
gtcaaaagacctttttaatttctactcttgtagatcaattctctctccattcttca

SEQ ID NO: 91 - RNA, 56 nt, synthetic construct
  source 1..56: mol_type = other RNA
gtcaaaagacctttttaatttctactcttgtagattcaattctctctccattcttc

SEQ ID NO: 92 - RNA, 56 nt, synthetic construct
  source 1..56: mol_type = other RNA
gtcaaaagacctttttaatttctactcttgtagatttcaattctctctccattctt

SEQ ID NO: 93 - RNA, 56 nt, synthetic construct
  source 1..56: mol_type = other RNA
gtcaaaagacctttttaatttctactcttgtagatctgaagaatggagagagaatt

SEQ ID NO: 94 - RNA, 56 nt, synthetic construct
  source 1..56: mol_type = other RNA
gtcaaaagacctttttaatttctactcttgtagatctgaaagacaagtctgaatgc

SEQ ID NO: 95 - RNA, 56 nt, synthetic construct
  source 1..56: mol_type = other RNA
gtcaaaagacctttttaatttctactcttgtagattctttcagcaaggactggtct

SEQ ID NO: 96 - RNA, 56 nt, synthetic construct
  source 1..56: mol_type = other RNA
gtcaaaagacctttttaatttctactcttgtagatcagcaaggactggtctttcta

SEQ ID NO: 97 - RNA, 56 nt, synthetic construct
  source 1..56: mol_type = other RNA
gtcaaaagacctttttaatttctactcttgtagatagcaaggactggtctttctat

SEQ ID NO: 98 - RNA, 56 nt, synthetic construct
  source 1..56: mol_type = other RNA
gtcaaaagacctttttaatttctactcttgtagatagtgggggtgaattcagtgta

SEQ ID NO: 99 - RNA, 56 nt, synthetic construct
  source 1..56: mol_type = other RNA
gtcaaaagacctttttaatttctactcttgtagatcagtgggggtgaattcagtgt

SEQ ID NO: 100 - RNA, 56 nt, synthetic construct
  source 1..56: mol_type = other RNA
gtcaaaagacctttttaatttctactcttgtagattcagtgggggtgaattcagtg

SEQ ID NO: 101 - RNA, 56 nt, synthetic construct
  source 1..56: mol_type = other RNA
gtcaaaagacctttttaatttctactcttgtagatttcagtgggggtgaattcagt

SEQ ID NO: 102 - RNA, 56 nt, synthetic construct
  source 1..56: mol_type = other RNA
gtcaaaagacctttttaatttctactcttgtagatctatctcttgtactacactga

SEQ ID NO: 103 - RNA, 56 nt, synthetic construct
  source 1..56: mol_type = other RNA
gtcaaaagacctttttaatttctactcttgtagattatctcttgtactacactgaa

SEQ ID NO: 104 - RNA, 56 nt, synthetic construct
  source 1..56: mol_type = other RNA
gtcaaaagacctttttaatttctactcttgtagattactacactgaattcaccccc

SEQ ID NO: 105 - RNA, 56 nt, synthetic construct
  source 1..56: mol_type = other RNA
gtcaaaagacctttttaatttctactcttgtagatggctgtgacaaagtcacatgg

SEQ ID NO: 106 - RNA, 56 nt, synthetic construct
  source 1..56: mol_type = other RNA
gtcaaaagacctttttaatttctactcttgtagatactatcttgggctgtgacaaa

SEQ ID NO: 107 - RNA, 56 nt, synthetic construct
  source 1..56: mol_type = other RNA
gtcaaaagacctttttaatttctactcttgtagatccccacttaactatcttgggc

SEQ ID NO: 108 - RNA, 56 nt, synthetic construct
  source 1..56: mol_type = other RNA
gtcaaaagacctttttaatttctactcttgtagatgtcacagcccaagatagttaa

SEQ ID NO: 109 - RNA, 56 nt, synthetic construct
  source 1..56: mol_type = other RNA
gtcaaaagacctttttaatttctactcttgtagattcacagcccaagatagttaag

SEQ ID NO: 110 - RNA, 56 nt, synthetic construct
  source 1..56: mol_type = other RNA
gtcaaaagacctttttaatttctactcttgtagatcctccatgatgctgcttacat

SEQ ID NO: 111 - RNA, 56 nt, synthetic construct
  source 1..56: mol_type = other RNA
gtcaaaagacctttttaatttctactcttgtagatttcatagatcgagacatgtaa

SEQ ID NO: 112 - RNA, 56 nt, synthetic construct
  source 1..56: mol_type = other RNA
gtcaaaagacctttttaatttctactcttgtagattcatagatcgagacatgtaag

SEQ ID NO: 113 - RNA, 56 nt, synthetic construct
  source 1..56: mol_type = other RNA
gtcaaaagacctttttaatttctactcttgtagatcatagatcgagacatgtaagc

SEQ ID NO: 114 - RNA, 56 nt, synthetic construct
  source 1..56: mol_type = other RNA
gtcaaaagacctttttaatttctactcttgtagatatagatcgagacatgtaagca

SEQ ID NO: 115 - RNA, 21 nt, synthetic construct
  source 1..21: mol_type = other RNA
gggctctgacaggtaggaccc

SEQ ID NO: 116 - RNA, 21 nt, synthetic construct
  source 1..21: mol_type = other RNA
ccttggggctctgacaggtag

SEQ ID NO: 117 - RNA, 21 nt, synthetic construct
  source 1..21: mol_type = other RNA
accttggggctctgacaggta

SEQ ID NO: 118 - RNA, 21 nt, synthetic construct
  source 1..21: mol_type = other RNA
taccttggggctctgacaggt

SEQ ID NO: 119 - RNA, 21 nt, synthetic construct
  source 1..21: mol_type = other RNA
ttaccttggggctctgacagg

SEQ ID NO: 120 - RNA, 21 nt, synthetic construct
  source 1..21: mol_type = other RNA
ccggcctttttaccttggggc

SEQ ID NO: 121 - RNA, 21 nt, synthetic construct
  source 1..21: mol_type = other RNA
cccggcctttttaccttgggg

SEQ ID NO: 122 - RNA, 21 nt, synthetic construct
  source 1..21: mol_type = other RNA
cctcccaggcagctcacagtg

SEQ ID NO: 123 - RNA, 21 nt, synthetic construct
  source 1..21: mol_type = other RNA
taggggccccaactccatggt

SEQ ID NO: 124 - RNA, 21 nt, synthetic construct
  source 1..21: mol_type = other RNA
ttaacagcgatgctgaccccc

SEQ ID NO: 125 - RNA, 21 nt, synthetic construct
  source 1..21: mol_type = other RNA
acagcgatgctgaccccctgt

SEQ ID NO: 126 - RNA, 21 nt, synthetic construct
  source 1..21: mol_type = other RNA
tccagccaggtccatctggtc

SEQ ID NO: 127 - RNA, 21 nt, synthetic construct
  source 1..21: mol_type = other RNA
ttctccagccaggtccatctg

SEQ ID NO: 128 - RNA, 21 nt, synthetic construct
  source 1..21: mol_type = other RNA
tatgaccagatggacctggct

SEQ ID NO: 129 - RNA, 21 nt, synthetic construct
  source 1..21: mol_type = other RNA
tcctcccagaacccgacacag

SEQ ID NO: 130 - RNA, 21 nt, synthetic construct
  source 1..21: mol_type = other RNA
cctcccagaacccgacacaga

SEQ ID NO: 131 - RNA, 21 nt, synthetic construct
  source 1..21: mol_type = other RNA
ctcccagaacccgacacagac

SEQ ID NO: 132 - RNA, 21 nt, synthetic construct
  source 1..21: mol_type = other RNA
catgtcacacaacagcctgct

SEQ ID NO: 133 - RNA, 21 nt, synthetic construct
  source 1..21: mol_type = other RNA
atcaccttccatgtcacacaa

SEQ ID NO: 134 - RNA, 21 nt, synthetic construct
  source 1..21: mol_type = other RNA
ctcaccgatattggcataagc

SEQ ID NO: 135 - RNA, 21 nt, synthetic construct
  source 1..21: mol_type = other RNA
tccttgtctgggcagcggaac

SEQ ID NO: 136 - RNA, 21 nt, synthetic construct
  source 1..21: mol_type = other RNA
ccttgtctgggcagcggaact

SEQ ID NO: 137 - RNA, 21 nt, synthetic construct
  source 1..21: mol_type = other RNA
cttgtctgggcagcggaactg

SEQ ID NO: 138 - RNA, 21 nt, synthetic construct
  source 1..21: mol_type = other RNA
tctgggcagcggaactggacc

SEQ ID NO: 139 - RNA, 21 nt, synthetic construct
  source 1..21: mol_type = other RNA
ctcaggccctccagctgggag

SEQ ID NO: 140 - RNA, 21 nt, synthetic construct
  source 1..21: mol_type = other RNA
caggactcccagctggagggc

SEQ ID NO: 141 - RNA, 21 nt, synthetic construct
  source 1..21: mol_type = other RNA
ctgaaaatgtccttgctcagg

SEQ ID NO: 142 - RNA, 21 nt, synthetic construct
  source 1..21: mol_type = other RNA
tctcaaagtagagcacatagg

SEQ ID NO: 143 - RNA, 21 nt, synthetic construct
  source 1..21: mol_type = other RNA
ctcaaagtagagcacatagga

SEQ ID NO: 144 - RNA, 21 nt, synthetic construct
  source 1..21: mol_type = other RNA
tcaaagtagagcacataggac

SEQ ID NO: 145 - RNA, 21 nt, synthetic construct
  source 1..21: mol_type = other RNA
tgctggcatctccatactctc

SEQ ID NO: 146 - RNA, 21 nt, synthetic construct
  source 1..21: mol_type = other RNA
tgcccaacttctgctggcatc

SEQ ID NO: 147 - RNA, 21 nt, synthetic construct
  source 1..21: mol_type = other RNA
ctgcccaacttctgctggcat

SEQ ID NO: 148 - RNA, 21 nt, synthetic construct
  source 1..21: mol_type = other RNA
tctgcccaacttctgctggca

SEQ ID NO: 149 - RNA, 21 nt, synthetic construct
  source 1..21: mol_type = other RNA
tgacttttctgcccaacttct

SEQ ID NO: 150 - RNA, 21 nt, synthetic construct
  source 1..21: mol_type = other RNA
ctgacttttctgcccaacttc

SEQ ID NO: 151 - RNA, 21 nt, synthetic construct
  source 1..21: mol_type = other RNA
tctgacttttctgcccaactt

SEQ ID NO: 152 - RNA, 21 nt, synthetic construct
  source 1..21: mol_type = other RNA
aggtctgccggaagctcctct

SEQ ID NO: 153 - RNA, 21 nt, synthetic construct
  source 1..21: mol_type = other RNA
ctctgcagccttcccagagga

SEQ ID NO: 154 - RNA, 21 nt, synthetic construct
  source 1..21: mol_type = other RNA
tctgcagccttcccagaggag

SEQ ID NO: 155 - RNA, 21 nt, synthetic construct
  source 1..21: mol_type = other RNA
cagtgcttcaggtctgccgga

SEQ ID NO: 156 - RNA, 21 nt, synthetic construct
  source 1..21: mol_type = other RNA
ccagaggagcttccggcagac

SEQ ID NO: 157 - RNA, 21 nt, synthetic construct
  source 1..21: mol_type = other RNA
cggcagacctgaagcactgga

SEQ ID NO: 158 - RNA, 56 nt, synthetic construct
  source 1..56: mol_type = other RNA
gtcaaaagacctttttaatttctactcttgtagatgggctctgacaggtaggaccc

SEQ ID NO: 159 - RNA, 56 nt, synthetic construct
  source 1..56: mol_type = other RNA
gtcaaaagacctttttaatttctactcttgtagatccttggggctctgacaggtag

SEQ ID NO: 160 - RNA, 56 nt, synthetic construct
  source 1..56: mol_type = other RNA
gtcaaaagacctttttaatttctactcttgtagataccttggggctctgacaggta

SEQ ID NO: 161 - RNA, 56 nt, synthetic construct
  source 1..56: mol_type = other RNA
gtcaaaagacctttttaatttctactcttgtagattaccttggggctctgacaggt

SEQ ID NO: 162 - RNA, 56 nt, synthetic construct
  source 1..56: mol_type = other RNA
gtcaaaagacctttttaatttctactcttgtagatttaccttggggctctgacagg

SEQ ID NO: 163 - RNA, 56 nt, synthetic construct
  source 1..56: mol_type = other RNA
gtcaaaagacctttttaatttctactcttgtagatccggcctttttaccttggggc

SEQ ID NO: 164 - RNA, 56 nt, synthetic construct
  source 1..56: mol_type = other RNA
gtcaaaagacctttttaatttctactcttgtagatcccggcctttttaccttgggg

SEQ ID NO: 165 - RNA, 56 nt, synthetic construct
  source 1..56: mol_type = other RNA
gtcaaaagacctttttaatttctactcttgtagatcctcccaggcagctcacagtg

SEQ ID NO: 166 - RNA, 56 nt, synthetic construct
  source 1..56: mol_type = other RNA
gtcaaaagacctttttaatttctactcttgtagattaggggccccaactccatggt

SEQ ID NO: 167 - RNA, 56 nt, synthetic construct
  source 1..56: mol_type = other RNA
gtcaaaagacctttttaatttctactcttgtagatttaacagcgatgctgaccccc

SEQ ID NO: 168 - RNA, 56 nt, synthetic construct
  source 1..56: mol_type = other RNA
gtcaaaagacctttttaatttctactcttgtagatacagcgatgctgaccccctgt

SEQ ID NO: 169 - RNA, 56 nt, synthetic construct
  source 1..56: mol_type = other RNA
gtcaaaagacctttttaatttctactcttgtagattccagccaggtccatctggtc

SEQ ID NO: 170 - RNA, 56 nt, synthetic construct
  source 1..56: mol_type = other RNA
gtcaaaagacctttttaatttctactcttgtagatttctccagccaggtccatctg

SEQ ID NO: 171 - RNA, 56 nt, synthetic construct
  source 1..56: mol_type = other RNA
gtcaaaagacctttttaatttctactcttgtagattatgaccagatggacctggct

SEQ ID NO: 172 - RNA, 56 nt, synthetic construct
  source 1..56: mol_type = other RNA
gtcaaaagacctttttaatttctactcttgtagattcctcccagaacccgacacag

SEQ ID NO: 173 - RNA, 56 nt, synthetic construct
  source 1..56: mol_type = other RNA
gtcaaaagacctttttaatttctactcttgtagatcctcccagaacccgacacaga

SEQ ID NO: 174 - RNA, 56 nt, synthetic construct
  source 1..56: mol_type = other RNA
gtcaaaagacctttttaatttctactcttgtagatctcccagaacccgacacagac

SEQ ID NO: 175 - RNA, 56 nt, synthetic construct
  source 1..56: mol_type = other RNA
gtcaaaagacctttttaatttctactcttgtagatcatgtcacacaacagcctgct

SEQ ID NO: 176 - RNA, 56 nt, synthetic construct
  source 1..56: mol_type = other RNA
gtcaaaagacctttttaatttctactcttgtagatatcaccttccatgtcacacaa

SEQ ID NO: 177 - RNA, 56 nt, synthetic construct
  source 1..56: mol_type = other RNA
gtcaaaagacctttttaatttctactcttgtagatctcaccgatattggcataagc

SEQ ID NO: 178 - RNA, 56 nt, synthetic construct
  source 1..56: mol_type = other RNA
gtcaaaagacctttttaatttctactcttgtagattccttgtctgggcagcggaac

SEQ ID NO: 179 - RNA, 56 nt, synthetic construct
  source 1..56: mol_type = other RNA
gtcaaaagacctttttaatttctactcttgtagatccttgtctgggcagcggaact

SEQ ID NO: 180 - RNA, 56 nt, synthetic construct
  source 1..56: mol_type = other RNA
gtcaaaagacctttttaatttctactcttgtagatcttgtctgggcagcggaactg

SEQ ID NO: 181 - RNA, 56 nt, synthetic construct
  source 1..56: mol_type = other RNA
gtcaaaagacctttttaatttctactcttgtagattctgggcagcggaactggacc

SEQ ID NO: 182 - RNA, 56 nt, synthetic construct
  source 1..56: mol_type = other RNA
gtcaaaagacctttttaatttctactcttgtagatctcaggccctccagctgggag

SEQ ID NO: 183 - RNA, 56 nt, synthetic construct
  source 1..56: mol_type = other RNA
gtcaaaagacctttttaatttctactcttgtagatcaggactcccagctggagggc

SEQ ID NO: 184 - RNA, 56 nt, synthetic construct
  source 1..56: mol_type = other RNA
gtcaaaagacctttttaatttctactcttgtagatctgaaaatgtccttgctcagg

SEQ ID NO: 185 - RNA, 56 nt, synthetic construct
  source 1..56: mol_type = other RNA
gtcaaaagacctttttaatttctactcttgtagattctcaaagtagagcacatagg

SEQ ID NO: 186 - RNA, 56 nt, synthetic construct
  source 1..56: mol_type = other RNA
gtcaaaagacctttttaatttctactcttgtagatctcaaagtagagcacatagga

SEQ ID NO: 187 - RNA, 56 nt, synthetic construct
  source 1..56: mol_type = other RNA
gtcaaaagacctttttaatttctactcttgtagattcaaagtagagcacataggac

SEQ ID NO: 188 - RNA, 56 nt, synthetic construct
  source 1..56: mol_type = other RNA
gtcaaaagacctttttaatttctactcttgtagattgctggcatctccatactctc

SEQ ID NO: 189 - RNA, 56 nt, synthetic construct
  source 1..56: mol_type = other RNA
gtcaaaagacctttttaatttctactcttgtagattgcccaacttctgctggcatc

SEQ ID NO: 190 - RNA, 56 nt, synthetic construct
  source 1..56: mol_type = other RNA
gtcaaaagacctttttaatttctactcttgtagatctgcccaacttctgctggcat

SEQ ID NO: 191 - RNA, 56 nt, synthetic construct
  source 1..56: mol_type = other RNA
gtcaaaagacctttttaatttctactcttgtagattctgcccaacttctgctggca

SEQ ID NO: 192 - RNA, 56 nt, synthetic construct
  source 1..56: mol_type = other RNA
gtcaaaagacctttttaatttctactcttgtagattgacttttctgcccaacttct

SEQ ID NO: 193 - RNA, 56 nt, synthetic construct
  source 1..56: mol_type = other RNA
gtcaaaagacctttttaatttctactcttgtagatctgacttttctgcccaacttc

SEQ ID NO: 194 - RNA, 56 nt, synthetic construct
  source 1..56: mol_type = other RNA
gtcaaaagacctttttaatttctactcttgtagattctgacttttctgcccaactt

SEQ ID NO: 195 - RNA, 56 nt, synthetic construct
  source 1..56: mol_type = other RNA
gtcaaaagacctttttaatttctactcttgtagataggtctgccggaagctcctct

SEQ ID NO: 196 - RNA, 56 nt, synthetic construct
  source 1..56: mol_type = other RNA
gtcaaaagacctttttaatttctactcttgtagatctctgcagccttcccagagga

SEQ ID NO: 197 - RNA, 56 nt, synthetic construct
  source 1..56: mol_type = other RNA
gtcaaaagacctttttaatttctactcttgtagattctgcagccttcccagaggag

SEQ ID NO: 198 - RNA, 56 nt, synthetic construct
  source 1..56: mol_type = other RNA
gtcaaaagacctttttaatttctactcttgtagatcagtgcttcaggtctgccgga

SEQ ID NO: 199 - RNA, 56 nt, synthetic construct
  source 1..56: mol_type = other RNA
gtcaaaagacctttttaatttctactcttgtagatccagaggagcttccggcagac

SEQ ID NO: 200 - RNA, 56 nt, synthetic construct
  source 1..56: mol_type = other RNA
gtcaaaagacctttttaatttctactcttgtagatcggcagacctgaagcactgga

SEQ ID NO: 201 - RNA, 20 nt, synthetic construct
  source 1..20: mol_type = other RNA
tataagtggaggcgtcgcgc

SEQ ID NO: 202 - RNA, 20 nt, synthetic construct
  source 1..20: mol_type = other RNA
aagtggaggcgtcgcgctgg

SEQ ID NO: 203 - RNA, 20 nt, synthetic construct
  source 1..20: mol_type = other RNA
agtggaggcgtcgcgctggc

SEQ ID NO: 204 - RNA, 20 nt, synthetic construct
  source 1..20: mol_type = other RNA
gcccgaatgctgtcagcttc

SEQ ID NO: 205 - RNA, 20 nt, synthetic construct
  source 1..20: mol_type = other RNA
ttcctgaagctgacagcatt

SEQ ID NO: 206 - RNA, 20 nt, synthetic construct
  source 1..20: mol_type = other RNA
tcctgaagctgacagcattc

SEQ ID NO: 207 - RNA, 20 nt, synthetic construct
  source 1..20: mol_type = other RNA
ggccacggagcgagacatct

SEQ ID NO: 208 - RNA, 20 nt, synthetic construct
  source 1..20: mol_type = other RNA
ggccgagatgtctcgctccg

SEQ ID NO: 209 - RNA, 20 nt, synthetic construct
  source 1..20: mol_type = other RNA
cgcgagcacagctaaggcca

SEQ ID NO: 210 - RNA, 20 nt, synthetic construct
  source 1..20: mol_type = other RNA
gagtagcgcgagcacagcta

SEQ ID NO: 211 - RNA, 20 nt, synthetic construct
  source 1..20: mol_type = other RNA
ctcgcgctactctctctttc

SEQ ID NO: 212 - RNA, 20 nt, synthetic construct
  source 1..20: mol_type = other RNA
gctactctctctttctggcc

SEQ ID NO: 213 - RNA, 20 nt, synthetic construct
  source 1..20: mol_type = other RNA
actctctctttctggcctgg

SEQ ID NO: 214 - RNA, 20 nt, synthetic construct
  source 1..20: mol_type = other RNA
actcacgctggatagcctcc

SEQ ID NO: 215 - RNA, 20 nt, synthetic construct
  source 1..20: mol_type = other RNA
agggtaggagagactcacgc

SEQ ID NO: 216 - RNA, 20 nt, synthetic construct
  source 1..20: mol_type = other RNA
aaggaccagagcgggagggt

SEQ ID NO: 217 - RNA, 20 nt, synthetic construct
  source 1..20: mol_type = other RNA
gaggaaggaccagagcggga

SEQ ID NO: 218 - RNA, 20 nt, synthetic construct
  source 1..20: mol_type = other RNA
agaggaaggaccagagcggg

SEQ ID NO: 219 - RNA, 20 nt, synthetic construct
  source 1..20: mol_type = other RNA
tctctcctaccctcccgctc

SEQ ID NO: 220 - RNA, 20 nt, synthetic construct
  source 1..20: mol_type = other RNA
gggagaggaaggaccagagc

SEQ ID NO: 221 - RNA, 20 nt, synthetic construct
  source 1..20: mol_type = other RNA
cgggagaggaaggaccagag

SEQ ID NO: 222 - RNA, 20 nt, synthetic construct
  source 1..20: mol_type = other RNA
gggtgcagagcgggagagga

SEQ ID NO: 223 - RNA, 20 nt, synthetic construct
  source 1..20: mol_type = other RNA
cagagggtgcagagcgggag

SEQ ID NO: 224 - RNA, 20 nt, synthetic construct
  source 1..20: mol_type = other RNA
ggccacagagggtgcagagc

SEQ ID NO: 225 - RNA, 20 nt, synthetic construct
  source 1..20: mol_type = other RNA
gggccacagagggtgcagag

SEQ ID NO: 226 - RNA, 20 nt, synthetic construct
  source 1..20: mol_type = other RNA
ctcccgctctgcaccctctg

SEQ ID NO: 227 - RNA, 20 nt, synthetic construct
  source 1..20: mol_type = other RNA
agcacagcgagggccacaga

SEQ ID NO: 228 - RNA, 20 nt, synthetic construct
  source 1..20: mol_type = other RNA
gagcacagcgagggccacag

SEQ ID NO: 229 - RNA, 20 nt, synthetic construct
  source 1..20: mol_type = other RNA
ggagcgagagagcacagcga

SEQ ID NO: 230 - RNA, 20 nt, synthetic construct
  source 1..20: mol_type = other RNA
cggagcgagagagcacagcg

SEQ ID NO: 231 - RNA, 20 nt, synthetic construct
  source 1..20: mol_type = other RNA
aacttggagaagggaagtca

SEQ ID NO: 232 - RNA, 20 nt, synthetic construct
  source 1..20: mol_type = other RNA
accaaggagaacttggagaa

SEQ ID NO: 233 - RNA, 20 nt, synthetic construct
  source 1..20: mol_type = other RNA
caccaaggagaacttggaga

SEQ ID NO: 234 - RNA, 20 nt, synthetic construct
  source 1..20: mol_type = other RNA
gcgggccaccaaggagaact

SEQ ID NO: 235 - RNA, 20 nt, synthetic construct
  source 1..20: mol_type = other RNA
tcccttctccaagttctcct

SEQ ID NO: 236 - RNA, 20 nt, synthetic construct
  source 1..20: mol_type = other RNA
cttctccaagttctccttgg

SEQ ID NO: 237 - RNA, 20 nt, synthetic construct
  source 1..20: mol_type = other RNA
agccccacggcgggccacca

SEQ ID NO: 238 - RNA, 20 nt, synthetic construct
  source 1..20: mol_type = other RNA
ttctccttggtggcccgccg

SEQ ID NO: 239 - RNA, 20 nt, synthetic construct
  source 1..20: mol_type = other RNA
tctccttggtggcccgccgt

SEQ ID NO: 240 - RNA, 20 nt, synthetic construct
  source 1..20: mol_type = other RNA
ctccttggtggcccgccgtg

SEQ ID NO: 241 - RNA, 20 nt, synthetic construct
  source 1..20: mol_type = other RNA
ccctggactagccccacggc

SEQ ID NO: 242 - RNA, 20 nt, synthetic construct
  source 1..20: mol_type = other RNA
gccctggactagccccacgg

SEQ ID NO: 243 - RNA, 20 nt, synthetic construct
  source 1..20: mol_type = other RNA
ccagccctggactagcccca

SEQ ID NO: 244 - RNA, 20 nt, synthetic construct
  source 1..20: mol_type = other RNA
gcccgccgtggggctagtcc

SEQ ID NO: 245 - RNA, 20 nt, synthetic construct
  source 1..20: mol_type = other RNA
cccgccgtggggctagtcca

SEQ ID NO: 246 - RNA, 20 nt, synthetic construct
  source 1..20: mol_type = other RNA
ccgtggggctagtccagggc

SEQ ID NO: 247 - RNA, 20 nt, synthetic construct
  source 1..20: mol_type = other RNA
gcttccccgagatccagccc

SEQ ID NO: 248 - RNA, 20 nt, synthetic construct
  source 1..20: mol_type = other RNA
gctagtccagggctggatct

SEQ ID NO: 249 - RNA, 20 nt, synthetic construct
  source 1..20: mol_type = other RNA
ctagtccagggctggatctc

SEQ ID NO: 250 - RNA, 20 nt, synthetic construct
  source 1..20: mol_type = other RNA
tagtccagggctggatctcg

SEQ ID NO: 251 - RNA, 20 nt, synthetic construct
  source 1..20: mol_type = other RNA
agggctggatctcggggaag

SEQ ID NO: 252 - RNA, 20 nt, synthetic construct
  source 1..20: mol_type = other RNA
gctggatctcggggaagcgg

SEQ ID NO: 253 - RNA, 20 nt, synthetic construct
  source 1..20: mol_type = other RNA
ctggatctcggggaagcggc

SEQ ID NO: 254 - RNA, 20 nt, synthetic construct
  source 1..20: mol_type = other RNA
tggatctcggggaagcggcg

SEQ ID NO: 255 - RNA, 20 nt, synthetic construct
  source 1..20: mol_type = other RNA
atctcggggaagcggcgggg

SEQ ID NO: 256 - RNA, 20 nt, synthetic construct
  source 1..20: mol_type = other RNA
ggggaagcggcggggtggcc

SEQ ID NO: 257 - RNA, 20 nt, synthetic construct
  source 1..20: mol_type = other RNA
gggaagcggcggggtggcct

SEQ ID NO: 258 - RNA, 20 nt, synthetic construct
  source 1..20: mol_type = other RNA
gcggcggggtggcctgggag

SEQ ID NO: 259 - RNA, 20 nt, synthetic construct
  source 1..20: mol_type = other RNA
cggcggggtggcctgggagt

SEQ ID NO: 260 - RNA, 20 nt, synthetic construct
  source 1..20: mol_type = other RNA
gcacccccttccccactccc

SEQ ID NO: 261 - RNA, 20 nt, synthetic construct
  source 1..20: mol_type = other RNA
ggcggggtggcctgggagtg

SEQ ID NO: 262 - RNA, 20 nt, synthetic construct
  source 1..20: mol_type = other RNA
gggtggcctgggagtgggga

SEQ ID NO: 263 - RNA, 20 nt, synthetic construct
  source 1..20: mol_type = other RNA
ggtggcctgggagtggggaa

SEQ ID NO: 264 - RNA, 20 nt, synthetic construct
  source 1..20: mol_type = other RNA
gtggcctgggagtggggaag

SEQ ID NO: 265 - RNA, 20 nt, synthetic construct
  source 1..20: mol_type = other RNA
tggcctgggagtggggaagg

SEQ ID NO: 266 - RNA, 20 nt, synthetic construct
  source 1..20: mol_type = other RNA
tggggaagggggtgcgcacc

SEQ ID NO: 267 - RNA, 20 nt, synthetic construct
  source 1..20: mol_type = other RNA
ggggaagggggtgcgcaccc

SEQ ID NO: 268 - RNA, 20 nt, synthetic construct
  source 1..20: mol_type = other RNA
gggcaagtagcgcgcgtccc

SEQ ID NO: 269 - RNA, 20 nt, synthetic construct
  source 1..20: mol_type = other RNA
ggggcaagtagcgcgcgtcc

SEQ ID NO: 270 - RNA, 20 nt, synthetic construct
  source 1..20: mol_type = other RNA
cgcgcgctacttgccccttt

SEQ ID NO: 271 - RNA, 20 nt, synthetic construct
  source 1..20: mol_type = other RNA
cccctgctccccgccgaaag

SEQ ID NO: 272 - RNA, 20 nt, synthetic construct
  source 1..20: mol_type = other RNA
gcgctacttgcccctttcgg

SEQ ID NO: 273 - RNA, 20 nt, synthetic construct
  source 1..20: mol_type = other RNA
tcccctgctccccgccgaaa

SEQ ID NO: 274 - RNA, 20 nt, synthetic construct
  source 1..20: mol_type = other RNA
cgctacttgcccctttcggc

SEQ ID NO: 275 - RNA, 20 nt, synthetic construct
  source 1..20: mol_type = other RNA
ctcccctgctccccgccgaa

SEQ ID NO: 276 - RNA, 20 nt, synthetic construct
  source 1..20: mol_type = other RNA
gctacttgcccctttcggcg

SEQ ID NO: 277 - RNA, 20 nt, synthetic construct
  source 1..20: mol_type = other RNA
tgcccctttcggcggggagc

SEQ ID NO: 278 - RNA, 20 nt, synthetic construct
  source 1..20: mol_type = other RNA
gcccctttcggcggggagca

SEQ ID NO: 279 - RNA, 20 nt, synthetic construct
  source 1..20: mol_type = other RNA
cccctttcggcggggagcag

SEQ ID NO: 280 - RNA, 20 nt, synthetic construct
  source 1..20: mol_type = other RNA
cggggagcaggggagacctt

SEQ ID NO: 281 - RNA, 20 nt, synthetic construct
  source 1..20: mol_type = other RNA
ctcccgtcgccgtaggccaa

SEQ ID NO: 282 - RNA, 20 nt, synthetic construct
  source 1..20: mol_type = other RNA
caggggagacctttggccta

SEQ ID NO: 283 - RNA, 20 nt, synthetic construct
  source 1..20: mol_type = other RNA
cccgaccctcccgtcgccgt

SEQ ID NO: 284 - RNA, 20 nt, synthetic construct
  source 1..20: mol_type = other RNA
agacctttggcctacggcga

SEQ ID NO: 285 - RNA, 20 nt, synthetic construct
  source 1..20: mol_type = other RNA
gacctttggcctacggcgac

SEQ ID NO: 286 - RNA, 20 nt, synthetic construct
  source 1..20: mol_type = other RNA
ctttggcctacggcgacggg

SEQ ID NO: 287 - RNA, 20 nt, synthetic construct
  source 1..20: mol_type = other RNA
tttggcctacggcgacggga

SEQ ID NO: 288 - RNA, 20 nt, synthetic construct
  source 1..20: mol_type = other RNA
gcctacggcgacgggagggt

SEQ ID NO: 289 - RNA, 20 nt, synthetic construct
  source 1..20: mol_type = other RNA
cctacggcgacgggagggtc

SEQ ID NO: 290 - RNA, 20 nt, synthetic construct
  source 1..20: mol_type = other RNA
ggagggtcgggacaaagttt

SEQ ID NO: 291 - RNA, 20 nt, synthetic construct
  source 1..20: mol_type = other RNA
gagggtcgggacaaagttta

SEQ ID NO: 292 - RNA, 20 nt, synthetic construct
  source 1..20: mol_type = other RNA
cgataagcgtcagagcgccg

SEQ ID NO: 293 - RNA, 20 nt, synthetic construct
  source 1..20: mol_type = other RNA
aagcgtcagagcgccgaggt

SEQ ID NO: 294 - RNA, 20 nt, synthetic construct
  source 1..20: mol_type = other RNA
agcgtcagagcgccgaggtt

SEQ ID NO: 295 - RNA, 20 nt, synthetic construct
  source 1..20: mol_type = other RNA
gcgtcagagcgccgaggttg

SEQ ID NO: 296 - RNA, 20 nt, synthetic construct
  source 1..20: mol_type = other RNA
gagaaaccctcccccaacct

SEQ ID NO: 297 - RNA, 20 nt, synthetic construct
  source 1..20: mol_type = other RNA
cgtcagagcgccgaggttgg

SEQ ID NO: 298 - RNA, 20 nt, synthetic construct
  source 1..20: mol_type = other RNA
cagagcgccgaggttggggg

SEQ ID NO: 299 - RNA, 20 nt, synthetic construct
  source 1..20: mol_type = other RNA
agagcgccgaggttggggga

SEQ ID NO: 300 - RNA, 20 nt, synthetic construct
  source 1..20: mol_type = other RNA
ccagaggccccgcgaaagag

SEQ ID NO: 301 - RNA, 20 nt, synthetic construct
  source 1..20: mol_type = other RNA
gtttctcttccgctctttcg

SEQ ID NO: 302 - RNA, 20 nt, synthetic construct
  source 1..20: mol_type = other RNA
tttctcttccgctctttcgc

SEQ ID NO: 303 - RNA, 20 nt, synthetic construct
  source 1..20: mol_type = other RNA
ttctcttccgctctttcgcg

SEQ ID NO: 304 - RNA, 20 nt, synthetic construct
  source 1..20: mol_type = other RNA
ccgctctttcgcggggcctc

SEQ ID NO: 305 - RNA, 20 nt, synthetic construct
  source 1..20: mol_type = other RNA
agctgcgctgggggagccag

SEQ ID NO: 306 - RNA, 20 nt, synthetic construct
  source 1..20: mol_type = other RNA
ccccactccagctgcgctgg

SEQ ID NO: 307 - RNA, 20 nt, synthetic construct
  source 1..20: mol_type = other RNA
cccccactccagctgcgctg

SEQ ID NO: 308 - RNA, 20 nt, synthetic construct
  source 1..20: mol_type = other RNA
tcccccactccagctgcgct

SEQ ID NO: 309 - RNA, 20 nt, synthetic construct
  source 1..20: mol_type = other RNA
gtcccccactccagctgcgc

SEQ ID NO: 310 - RNA, 20 nt, synthetic construct
  source 1..20: mol_type = other RNA
tctggctcccccagcgcagc

SEQ ID NO: 311 - RNA, 20 nt, synthetic construct
  source 1..20: mol_type = other RNA
ctcccccagcgcagctggag

SEQ ID NO: 312 - RNA, 20 nt, synthetic construct
  source 1..20: mol_type = other RNA
tcccccagcgcagctggagt

SEQ ID NO: 313 - RNA, 20 nt, synthetic construct
  source 1..20: mol_type = other RNA
cccccagcgcagctggagtg

SEQ ID NO: 314 - RNA, 20 nt, synthetic construct
  source 1..20: mol_type = other RNA
ccccagcgcagctggagtgg

SEQ ID NO: 315 - RNA, 20 nt, synthetic construct
  source 1..20: mol_type = other RNA
agcgcagctggagtggggga

SEQ ID NO: 316 - RNA, 20 nt, synthetic construct
  source 1..20: mol_type = other RNA
gcgcagctggagtgggggac

SEQ ID NO: 317 - RNA, 20 nt, synthetic construct
  source 1..20: mol_type = other RNA
agctggagtgggggacgggt

SEQ ID NO: 318 - RNA, 20 nt, synthetic construct
  source 1..20: mol_type = other RNA
gacgggtaggctcgtcccaa

SEQ ID NO: 319 - RNA, 20 nt, synthetic construct
  source 1..20: mol_type = other RNA
aacctcagcgccgcgccttt

SEQ ID NO: 320 - RNA, 20 nt, synthetic construct
  source 1..20: mol_type = other RNA
gtaggctcgtcccaaaggcg

SEQ ID NO: 321 - RNA, 20 nt, synthetic construct
  source 1..20: mol_type = other RNA
aaacctcagcgccgcgcctt

SEQ ID NO: 322 - RNA, 20 nt, synthetic construct
  source 1..20: mol_type = other RNA
gtcccaaaggcgcggcgctg

SEQ ID NO: 323 - RNA, 20 nt, synthetic construct
  source 1..20: mol_type = other RNA
cgctgaggtttgtgaacgcg

SEQ ID NO: 324 - RNA, 20 nt, synthetic construct
  source 1..20: mol_type = other RNA
tgaggtttgtgaacgcgtgg

SEQ ID NO: 325 - RNA, 20 nt, synthetic construct
  source 1..20: mol_type = other RNA
gaggtttgtgaacgcgtgga

SEQ ID NO: 326 - RNA, 20 nt, synthetic construct
  source 1..20: mol_type = other RNA
aggtttgtgaacgcgtggag

SEQ ID NO: 327 - RNA, 20 nt, synthetic construct
  source 1..20: mol_type = other RNA
tgaacgcgtggaggggcgct

SEQ ID NO: 328 - RNA, 20 nt, synthetic construct
  source 1..20: mol_type = other RNA
gaacgcgtggaggggcgctt

SEQ ID NO: 329 - RNA, 20 nt, synthetic construct
  source 1..20: mol_type = other RNA
aacgcgtggaggggcgcttg

SEQ ID NO: 330 - RNA, 20 nt, synthetic construct
  source 1..20: mol_type = other RNA
gtggaggggcgcttggggtc

SEQ ID NO: 331 - RNA, 20 nt, synthetic construct
  source 1..20: mol_type = other RNA
tggaggggcgcttggggtct

SEQ ID NO: 332 - RNA, 20 nt, synthetic construct
  source 1..20: mol_type = other RNA
ggaggggcgcttggggtctg

SEQ ID NO: 333 - RNA, 20 nt, synthetic construct
  source 1..20: mol_type = other RNA
gaggggcgcttggggtctgg

SEQ ID NO: 334 - RNA, 20 nt, synthetic construct
  source 1..20: mol_type = other RNA
gggcgcttggggtctggggg

SEQ ID NO: 335 - RNA, 20 nt, synthetic construct
  source 1..20: mol_type = other RNA
ggtctgggggaggcgtcgcc

SEQ ID NO: 336 - RNA, 20 nt, synthetic construct
  source 1..20: mol_type = other RNA
gtctgggggaggcgtcgccc

SEQ ID NO: 337 - RNA, 20 nt, synthetic construct
  source 1..20: mol_type = other RNA
cgcagcagacaggcttaccc

SEQ ID NO: 338 - RNA, 20 nt, synthetic construct
  source 1..20: mol_type = other RNA
ccgcagcagacaggcttacc

SEQ ID NO: 339 - RNA, 20 nt, synthetic construct
  source 1..20: mol_type = other RNA
gaagcagagccgcagcagac

SEQ ID NO: 340 - RNA, 20 nt, synthetic construct
  source 1..20: mol_type = other RNA
ccgggtaagcctgtctgctg

SEQ ID NO: 341 - RNA, 20 nt, synthetic construct
  source 1..20: mol_type = other RNA
cggctctgcttcccttagac

SEQ ID NO: 342 - RNA, 20 nt, synthetic construct
  source 1..20: mol_type = other RNA
tccacagctctccagtctaa

SEQ ID NO: 343 - RNA, 20 nt, synthetic construct
  source 1..20: mol_type = other RNA
gtccacagctctccagtcta

SEQ ID NO: 344 - RNA, 20 nt, synthetic construct
  source 1..20: mol_type = other RNA
tcccttagactggagagctg

SEQ ID NO: 345 - RNA, 20 nt, synthetic construct
  source 1..20: mol_type = other RNA
gagagctgtggacttcgtct

SEQ ID NO: 346 - RNA, 20 nt, synthetic construct
  source 1..20: mol_type = other RNA
ctaggacatgcgaacttagc

SEQ ID NO: 347 - RNA, 20 nt, synthetic construct
  source 1..20: mol_type = other RNA
gctaggacatgcgaacttag

SEQ ID NO: 348 - RNA, 20 nt, synthetic construct
  source 1..20: mol_type = other RNA
cacatagacccagaggtgct

SEQ ID NO: 349 - RNA, 20 nt, synthetic construct
  source 1..20: mol_type = other RNA
ttcgcatgtcctagcacctc

SEQ ID NO: 350 - RNA, 20 nt, synthetic construct
  source 1..20: mol_type = other RNA
tcgcatgtcctagcacctct

SEQ ID NO: 351 - RNA, 20 nt, synthetic construct
  source 1..20: mol_type = other RNA
gtggccccacatagacccag

SEQ ID NO: 352 - RNA, 20 nt, synthetic construct
  source 1..20: mol_type = other RNA
ctagcacctctgggtctatg

SEQ ID NO: 353 - RNA, 20 nt, synthetic construct
  source 1..20: mol_type = other RNA
tagcacctctgggtctatgt

SEQ ID NO: 354 - RNA, 20 nt, synthetic construct
  source 1..20: mol_type = other RNA
agcacctctgggtctatgtg

SEQ ID NO: 355 - RNA, 20 nt, synthetic construct
  source 1..20: mol_type = other RNA
gtctatgtggggccacaccg

SEQ ID NO: 356 - RNA, 20 nt, synthetic construct
  source 1..20: mol_type = other RNA
tctatgtggggccacaccgt

SEQ ID NO: 357 - RNA, 20 nt, synthetic construct
  source 1..20: mol_type = other RNA
gctgtttcctccccacggtg

SEQ ID NO: 358 - RNA, 20 nt, synthetic construct
  source 1..20: mol_type = other RNA
ctatgtggggccacaccgtg

SEQ ID NO: 359 - RNA, 20 nt, synthetic construct
  source 1..20: mol_type = other RNA
tgtggggccacaccgtgggg

SEQ ID NO: 360 - RNA, 20 nt, synthetic construct
  source 1..20: mol_type = other RNA
cgcgtgctgtttcctcccca

SEQ ID NO: 361 - RNA, 20 nt, synthetic construct
  source 1..20: mol_type = other RNA
cgcgacgtttgtagaatgct

SEQ ID NO: 362 - RNA, 20 nt, synthetic construct
  source 1..20: mol_type = other RNA
tgcttggctgtgatacaaag

SEQ ID NO: 363 - RNA, 20 nt, synthetic construct
  source 1..20: mol_type = other RNA
ttttaaaagtgacatgtgat

SEQ ID NO: 364 - RNA, 20 nt, synthetic construct
  source 1..20: mol_type = other RNA
tttttaaaagtgacatgtga

SEQ ID NO: 365 - RNA, 20 nt, synthetic construct
  source 1..20: mol_type = other RNA
cacagaaagatgtcaataac

SEQ ID NO: 366 - RNA, 20 nt, synthetic construct
  source 1..20: mol_type = other RNA
acacagaaagatgtcaataa

SEQ ID NO: 367 - RNA, 20 nt, synthetic construct
  source 1..20: mol_type = other RNA
tgacatctttctgtgtgcca

SEQ ID NO: 368 - RNA, 20 nt, synthetic construct
  source 1..20: mol_type = other RNA
cgcaaagcacataaagtcct

SEQ ID NO: 369 - RNA, 20 nt, synthetic construct
  source 1..20: mol_type = other RNA
accatagtagttatctatgg

SEQ ID NO: 370 - RNA, 20 nt, synthetic construct
  source 1..20: mol_type = other RNA
ataaccatagtagttatcta

SEQ ID NO: 371 - RNA, 20 nt, synthetic construct
  source 1..20: mol_type = other RNA
tccgccatagataactacta

SEQ ID NO: 372 - RNA, 20 nt, synthetic construct
  source 1..20: mol_type = other RNA
ttagtttcttcatctgtgag

SEQ ID NO: 373 - RNA, 20 nt, synthetic construct
  source 1..20: mol_type = other RNA
tctcacagatgaagaaacta

SEQ ID NO: 374 - RNA, 20 nt, synthetic construct
  source 1..20: mol_type = other RNA
aattaagtttcttaaaatct

SEQ ID NO: 375 - RNA, 20 nt, synthetic construct
  source 1..20: mol_type = other RNA
tttaagaaacttaattacac

SEQ ID NO: 376 - RNA, 20 nt, synthetic construct
  source 1..20: mol_type = other RNA
ttaagaaacttaattacaca

SEQ ID NO: 377 - RNA, 20 nt, synthetic construct
  source 1..20: mol_type = other RNA
taagaaacttaattacacag

SEQ ID NO: 378 - RNA, 20 nt, synthetic construct
  source 1..20: mol_type = other RNA
ttaattacacaggggataaa

SEQ ID NO: 379 - RNA, 20 nt, synthetic construct
  source 1..20: mol_type = other RNA
gattgaagtcaagcctaacc

SEQ ID NO: 380 - RNA, 20 nt, synthetic construct
  source 1..20: mol_type = other RNA
attgaagtcaagcctaacca

SEQ ID NO: 381 - RNA, 20 nt, synthetic construct
  source 1..20: mol_type = other RNA
ctcccgcaaaagccctggtt

SEQ ID NO: 382 - RNA, 20 nt, synthetic construct
  source 1..20: mol_type = other RNA
atgcgctcccgcaaaagccc

SEQ ID NO: 383 - RNA, 20 nt, synthetic construct
  source 1..20: mol_type = other RNA
aagcctaaccagggcttttg

SEQ ID NO: 384 - RNA, 20 nt, synthetic construct
  source 1..20: mol_type = other RNA
agcctaaccagggcttttgc

SEQ ID NO: 385 - RNA, 20 nt, synthetic construct
  source 1..20: mol_type = other RNA
ttgcgggagcgcatgccttt

SEQ ID NO: 386 - RNA, 20 nt, synthetic construct
  source 1..20: mol_type = other RNA
atgcacgaattacagccaaa

SEQ ID NO: 387 - RNA, 20 nt, synthetic construct
  source 1..20: mol_type = other RNA
gagaatctcacgcagaaggc

SEQ ID NO: 388 - RNA, 20 nt, synthetic construct
  source 1..20: mol_type = other RNA
tctggagaatctcacgcaga

SEQ ID NO: 389 - RNA, 20 nt, synthetic construct
  source 1..20: mol_type = other RNA
ccatgccgcccagtttgctc

SEQ ID NO: 390 - RNA, 20 nt, synthetic construct
  source 1..20: mol_type = other RNA
tgagattctccagagcaaac

SEQ ID NO: 391 - RNA, 20 nt, synthetic construct
  source 1..20: mol_type = other RNA
gagattctccagagcaaact

SEQ ID NO: 392 - RNA, 20 nt, synthetic construct
  source 1..20: mol_type = other RNA
attctccagagcaaactggg

SEQ ID NO: 393 - RNA, 20 nt, synthetic construct
  source 1..20: mol_type = other RNA
ccagagcaaactgggcggca

SEQ ID NO: 394 - RNA, 20 nt, synthetic construct
  source 1..20: mol_type = other RNA
cagagcaaactgggcggcat

SEQ ID NO: 395 - RNA, 20 nt, synthetic construct
  source 1..20: mol_type = other RNA
actgggcggcatgggccctg

SEQ ID NO: 396 - RNA, 20 nt, synthetic construct
  source 1..20: mol_type = other RNA
ctctgtacgaaaagaccaca

SEQ ID NO: 397 - RNA, 20 nt, synthetic construct
  source 1..20: mol_type = other RNA
cctctgtacgaaaagaccac

SEQ ID NO: 398 - RNA, 20 nt, synthetic construct
  source 1..20: mol_type = other RNA
cctgtggtcttttcgtacag

SEQ ID NO: 399 - RNA, 20 nt, synthetic construct
  source 1..20: mol_type = other RNA
ctgtggtcttttcgtacaga

SEQ ID NO: 400 - RNA, 20 nt, synthetic construct
  source 1..20: mol_type = other RNA
cgtacagagggcttcctctt

SEQ ID NO: 401 - RNA, 20 nt, synthetic construct
  source 1..20: mol_type = other RNA
aaccaggcaaagagccaaag

SEQ ID NO: 402 - RNA, 20 nt, synthetic construct
  source 1..20: mol_type = other RNA
ttcctctttggctctttgcc

SEQ ID NO: 403 - RNA, 20 nt, synthetic construct
  source 1..20: mol_type = other RNA
agtacatcttggaaacaacc

SEQ ID NO: 404 - RNA, 20 nt, synthetic construct
  source 1..20: mol_type = other RNA
gtaagaggcacagtacatct

SEQ ID NO: 405 - RNA, 20 nt, synthetic construct
  source 1..20: mol_type = other RNA
ttttcaaaaccgaaagtaag

SEQ ID NO: 406 - RNA, 20 nt, synthetic construct
  source 1..20: mol_type = other RNA
tgtactgtgcctcttacttt

SEQ ID NO: 407 - RNA, 20 nt, synthetic construct
  source 1..20: mol_type = other RNA
ctttcggttttgaaaacatg

SEQ ID NO: 408 - RNA, 20 nt, synthetic construct
  source 1..20: mol_type = other RNA
tttcggttttgaaaacatga

SEQ ID NO: 409 - RNA, 20 nt, synthetic construct
  source 1..20: mol_type = other RNA
ttcggttttgaaaacatgag

SEQ ID NO: 410 - RNA, 20 nt, synthetic construct
  source 1..20: mol_type = other RNA
tcggttttgaaaacatgagg

SEQ ID NO: 411 - RNA, 20 nt, synthetic construct
  source 1..20: mol_type = other RNA
ttttgaaaacatgagggggt

SEQ ID NO: 412 - RNA, 20 nt, synthetic construct
  source 1..20: mol_type = other RNA
tttgaaaacatgagggggtt

SEQ ID NO: 413 - RNA, 20 nt, synthetic construct
  source 1..20: mol_type = other RNA
aaacatgagggggttgggcg

SEQ ID NO: 414 - RNA, 20 nt, synthetic construct
  source 1..20: mol_type = other RNA
tccctaagtgctgggattac

SEQ ID NO: 415 - RNA, 20 nt, synthetic construct
  source 1..20: mol_type = other RNA
cctcggcctccctaagtgct

SEQ ID NO: 416 - RNA, 20 nt, synthetic construct
  source 1..20: mol_type = other RNA
cgcctgtaatcccagcactt

SEQ ID NO: 417 - RNA, 20 nt, synthetic construct
  source 1..20: mol_type = other RNA
gcctcggcctccctaagtgc

SEQ ID NO: 418 - RNA, 20 nt, synthetic construct
  source 1..20: mol_type = other RNA
gcctgtaatcccagcactta

SEQ ID NO: 419 - RNA, 20 nt, synthetic construct
  source 1..20: mol_type = other RNA
tgtaatcccagcacttaggg

SEQ ID NO: 420 - RNA, 20 nt, synthetic construct
  source 1..20: mol_type = other RNA
cccagcacttagggaggccg

SEQ ID NO: 421 - RNA, 20 nt, synthetic construct
  source 1..20: mol_type = other RNA
agcacttagggaggccgagg

SEQ ID NO: 422 - RNA, 20 nt, synthetic construct
  source 1..20: mol_type = other RNA
gcacttagggaggccgaggc

SEQ ID NO: 423 - RNA, 20 nt, synthetic construct
  source 1..20: mol_type = other RNA
ctcaagccatcctcccgcct

SEQ ID NO: 424 - RNA, 20 nt, synthetic construct
  source 1..20: mol_type = other RNA
cttagggaggccgaggcggg

SEQ ID NO: 425 - RNA, 20 nt, synthetic construct
  source 1..20: mol_type = other RNA
gggaggccgaggcgggagga

SEQ ID NO: 426 - RNA, 20 nt, synthetic construct
  source 1..20: mol_type = other RNA
cgaggcgggaggatggcttg

SEQ ID NO: 427 - RNA, 20 nt, synthetic construct
  source 1..20: mol_type = other RNA
ggccaggctggtctcaacta

SEQ ID NO: 428 - RNA, 20 nt, synthetic construct
  source 1..20: mol_type = other RNA
gtccgtagttgagaccagcc

SEQ ID NO: 429 - RNA, 20 nt, synthetic construct
  source 1..20: mol_type = other RNA
cttcaccatgttggccaggc

SEQ ID NO: 430 - RNA, 20 nt, synthetic construct
  source 1..20: mol_type = other RNA
caggcttcaccatgttggcc

SEQ ID NO: 431 - RNA, 20 nt, synthetic construct
  source 1..20: mol_type = other RNA
tgagaccagcctggccaaca

SEQ ID NO: 432 - RNA, 20 nt, synthetic construct
  source 1..20: mol_type = other RNA
gagaccaggcttcaccatgt

SEQ ID NO: 433 - RNA, 20 nt, synthetic construct
  source 1..20: mol_type = other RNA
ctggccaacatggtgaagcc

SEQ ID NO: 434 - RNA, 20 nt, synthetic construct
  source 1..20: mol_type = other RNA
tattattttttgtagagacc

SEQ ID NO: 435 - RNA, 20 nt, synthetic construct
  source 1..20: mol_type = other RNA
aaataataacaaaaattagc

SEQ ID NO: 436 - RNA, 20 nt, synthetic construct
  source 1..20: mol_type = other RNA
aataataacaaaaattagcc

SEQ ID NO: 437 - RNA, 20 nt, synthetic construct
  source 1..20: mol_type = other RNA
taacaaaaattagccgggtg

SEQ ID NO: 438 - RNA, 20 nt, synthetic construct
  source 1..20: mol_type = other RNA
caggcacgagccaccacacc

SEQ ID NO: 439 - RNA, 20 nt, synthetic construct
  source 1..20: mol_type = other RNA
caaaaattagccgggtgtgg

SEQ ID NO: 440 - RNA, 20 nt, synthetic construct
  source 1..20: mol_type = other RNA
ggtgtggtggctcgtgcctg

SEQ ID NO: 441 - RNA, 20 nt, synthetic construct
  source 1..20: mol_type = other RNA
accggagcagctgggaccac

SEQ ID NO: 442 - RNA, 20 nt, synthetic construct
  source 1..20: mol_type = other RNA
cctcagccaccggagcagct

SEQ ID NO: 443 - RNA, 20 nt, synthetic construct
  source 1..20: mol_type = other RNA
gcctcagccaccggagcagc

SEQ ID NO: 444 - RNA, 20 nt, synthetic construct
  source 1..20: mol_type = other RNA
gcctgtggtcccagctgctc

SEQ ID NO: 445 - RNA, 20 nt, synthetic construct
  source 1..20: mol_type = other RNA
tgtggtcccagctgctccgg

SEQ ID NO: 446 - RNA, 20 nt, synthetic construct
  source 1..20: mol_type = other RNA
gatcctcccgcctcagccac

SEQ ID NO: 447 - RNA, 20 nt, synthetic construct
  source 1..20: mol_type = other RNA
cccagctgctccggtggctg

SEQ ID NO: 448 - RNA, 20 nt, synthetic construct
  source 1..20: mol_type = other RNA
agctgctccggtggctgagg

SEQ ID NO: 449 - RNA, 20 nt, synthetic construct
  source 1..20: mol_type = other RNA
gctgctccggtggctgaggc

SEQ ID NO: 450 - RNA, 20 nt, synthetic construct
  source 1..20: mol_type = other RNA
gctccggtggctgaggcggg

SEQ ID NO: 451 - RNA, 20 nt, synthetic construct
  source 1..20: mol_type = other RNA
cgggaggatctcttgagctt

SEQ ID NO: 452 - RNA, 20 nt, synthetic construct
  source 1..20: mol_type = other RNA
cttaggcttttgagctatca

SEQ ID NO: 453 - RNA, 20 nt, synthetic construct
  source 1..20: mol_type = other RNA
ttgcccacgctggagtgcac

SEQ ID NO: 454 - RNA, 20 nt, synthetic construct
  source 1..20: mol_type = other RNA
ggcgccagtgcactccagcg

SEQ ID NO: 455 - RNA, 20 nt, synthetic construct
  source 1..20: mol_type = other RNA
gcgccagtgcactccagcgt

SEQ ID NO: 456 - RNA, 20 nt, synthetic construct
  source 1..20: mol_type = other RNA
tctcgctctgttgcccacgc

SEQ ID NO: 457 - RNA, 20 nt, synthetic construct
  source 1..20: mol_type = other RNA
tttttcttttttgagagaca

SEQ ID NO: 458 - RNA, 20 nt, synthetic construct
  source 1..20: mol_type = other RNA
ttttttcttttttgagagac

SEQ ID NO: 459 - RNA, 20 nt, synthetic construct
  source 1..20: mol_type = other RNA
gaaaagaaagaaagaagtga

SEQ ID NO: 460 - RNA, 20 nt, synthetic construct
  source 1..20: mol_type = other RNA
gaagtgaaggtttgtcagtc

SEQ ID NO: 461 - RNA, 20 nt, synthetic construct
  source 1..20: mol_type = other RNA
aagtgaaggtttgtcagtca

SEQ ID NO: 462 - RNA, 20 nt, synthetic construct
  source 1..20: mol_type = other RNA
agtgaaggtttgtcagtcag

SEQ ID NO: 463 - RNA, 20 nt, synthetic construct
  source 1..20: mol_type = other RNA
tcttggattatctttattaa

SEQ ID NO: 464 - RNA, 20 nt, synthetic construct
  source 1..20: mol_type = other RNA
ttaataaagataatccaaga

SEQ ID NO: 465 - RNA, 20 nt, synthetic construct
  source 1..20: mol_type = other RNA
aacagtcttggtaaccatct

SEQ ID NO: 466 - RNA, 20 nt, synthetic construct
  source 1..20: mol_type = other RNA
tctggcgtcctcaacagtct

SEQ ID NO: 467 - RNA, 20 nt, synthetic construct
  source 1..20: mol_type = other RNA
gatggttaccaagactgttg

SEQ ID NO: 468 - RNA, 20 nt, synthetic construct
  source 1..20: mol_type = other RNA
tagaaagtgctcaagatctc

SEQ ID NO: 469 - RNA, 20 nt, synthetic construct
  source 1..20: mol_type = other RNA
ttgagcactttctaagtacc

SEQ ID NO: 470 - RNA, 20 nt, synthetic construct
  source 1..20: mol_type = other RNA
agcgcgcttagtgtattgcc

SEQ ID NO: 471 - RNA, 20 nt, synthetic construct
  source 1..20: mol_type = other RNA
tcatgttttgccagaggaaa

SEQ ID NO: 472 - RNA, 20 nt, synthetic construct
  source 1..20: mol_type = other RNA
agcgcgctcaccttttcctc

SEQ ID NO: 473 - RNA, 20 nt, synthetic construct
  source 1..20: mol_type = other RNA
tttcgatcatgttttgccag

SEQ ID NO: 474 - RNA, 20 nt, synthetic construct
  source 1..20: mol_type = other RNA
acaatttatttacaacataa

SEQ ID NO: 475 - RNA, 20 nt, synthetic construct
  source 1..20: mol_type = other RNA
ccagcaaataccagtaatgg

SEQ ID NO: 476 - RNA, 20 nt, synthetic construct
  source 1..20: mol_type = other RNA
gtatatatcaccaccattac

SEQ ID NO: 477 - RNA, 20 nt, synthetic construct
  source 1..20: mol_type = other RNA
taaccagcaaataccagtaa

SEQ ID NO: 478 - RNA, 20 nt, synthetic construct
  source 1..20: mol_type = other RNA
ccaccattactggtatttgc

SEQ ID NO: 479 - RNA, 20 nt, synthetic construct
  source 1..20: mol_type = other RNA
atgcatggcatgtattactt

SEQ ID NO: 480 - RNA, 20 nt, synthetic construct
  source 1..20: mol_type = other RNA
ttccagaaatggtctatgca

SEQ ID NO: 481 - RNA, 20 nt, synthetic construct
  source 1..20: mol_type = other RNA
tgccatgcatagaccatttc

SEQ ID NO: 482 - RNA, 20 nt, synthetic construct
  source 1..20: mol_type = other RNA
cttgtggtatcttccagaaa

SEQ ID NO: 483 - RNA, 20 nt, synthetic construct
  source 1..20: mol_type = other RNA
tcatcattacatgtttcttg

SEQ ID NO: 484 - RNA, 20 nt, synthetic construct
  source 1..20: mol_type = other RNA
gtaatgatgattgcctctga

SEQ ID NO: 485 - RNA, 20 nt, synthetic construct
  source 1..20: mol_type = other RNA
ggaggaaaatagaccttcag

SEQ ID NO: 486 - RNA, 20 nt, synthetic construct
  source 1..20: mol_type = other RNA
acccacacacaggtcagagg

SEQ ID NO: 487 - RNA, 20 nt, synthetic construct
  source 1..20: mol_type = other RNA
aaaacccacacacaggtcag

SEQ ID NO: 488 - RNA, 20 nt, synthetic construct
  source 1..20: mol_type = other RNA
ttcctcctctgacctgtgtg

SEQ ID NO: 489 - RNA, 20 nt, synthetic construct
  source 1..20: mol_type = other RNA
tcctcctctgacctgtgtgt

SEQ ID NO: 490 - RNA, 20 nt, synthetic construct
  source 1..20: mol_type = other RNA
caaaaacaaaacccacacac

SEQ ID NO: 491 - RNA, 20 nt, synthetic construct
  source 1..20: mol_type = other RNA
gttttgtttttgttttactg

SEQ ID NO: 492 - RNA, 20 nt, synthetic construct
  source 1..20: mol_type = other RNA
ttttgtttttgttttactgt

SEQ ID NO: 493 - RNA, 20 nt, synthetic construct
  source 1..20: mol_type = other RNA
ttaatttttcagttaagttt

SEQ ID NO: 494 - RNA, 20 nt, synthetic construct
  source 1..20: mol_type = other RNA
gttactggctttatgacttt

SEQ ID NO: 495 - RNA, 20 nt, synthetic construct
  source 1..20: mol_type = other RNA
aaagtcataaagccagtaac

SEQ ID NO: 496 - RNA, 20 nt, synthetic construct
  source 1..20: mol_type = other RNA
atttgggctcaaccagttac

SEQ ID NO: 497 - RNA, 20 nt, synthetic construct
  source 1..20: mol_type = other RNA
gacaggctgggtttgaattt

SEQ ID NO: 498 - RNA, 20 nt, synthetic construct
  source 1..20: mol_type = other RNA
agacaggctgggtttgaatt

SEQ ID NO: 499 - RNA, 20 nt, synthetic construct
  source 1..20: mol_type = other RNA
ggacaagtatcagacaggct

SEQ ID NO: 500 - RNA, 20 nt, synthetic construct
  source 1..20: mol_type = other RNA
aggacaagtatcagacaggc

SEQ ID NO: 501 - RNA, 20 nt, synthetic construct
  source 1..20: mol_type = other RNA
gaagaggacaagtatcagac

SEQ ID NO: 502 - RNA, 20 nt, synthetic construct
  source 1..20: mol_type = other RNA
ctgtaatcttttctaagaag

SEQ ID NO: 503 - RNA, 20 nt, synthetic construct
  source 1..20: mol_type = other RNA
actctctgtttgagggaagg

SEQ ID NO: 504 - RNA, 20 nt, synthetic construct
  source 1..20: mol_type = other RNA
ggaactctctgtttgaggga

SEQ ID NO: 505 - RNA, 20 nt, synthetic construct
  source 1..20: mol_type = other RNA
gcctggaactctctgtttga

SEQ ID NO: 506 - RNA, 20 nt, synthetic construct
  source 1..20: mol_type = other RNA
tgcctggaactctctgtttg

SEQ ID NO: 507 - RNA, 20 nt, synthetic construct
  source 1..20: mol_type = other RNA
tccctcaaacagagagttcc

SEQ ID NO: 508 - RNA, 20 nt, synthetic construct
  source 1..20: mol_type = other RNA
tcaaacagagagttccaggc

SEQ ID NO: 509 - RNA, 20 nt, synthetic construct
  source 1..20: mol_type = other RNA
gagcacagattcatcctgcc

SEQ ID NO: 510 - RNA, 20 nt, synthetic construct
  source 1..20: mol_type = other RNA
aatctgtgctctgatccctg

SEQ ID NO: 511 - RNA, 20 nt, synthetic construct
  source 1..20: mol_type = other RNA
agaacatattaaatgcctca

SEQ ID NO: 512 - RNA, 20 nt, synthetic construct
  source 1..20: mol_type = other RNA
aagaacatattaaatgcctc

SEQ ID NO: 513 - RNA, 20 nt, synthetic construct
  source 1..20: mol_type = other RNA
ttaatgttatgaaaaaaatc

SEQ ID NO: 514 - RNA, 20 nt, synthetic construct
  source 1..20: mol_type = other RNA
ccccatcaagaggtggattg

SEQ ID NO: 515 - RNA, 20 nt, synthetic construct
  source 1..20: mol_type = other RNA
gccccatcaagaggtggatt

SEQ ID NO: 516 - RNA, 20 nt, synthetic construct
  source 1..20: mol_type = other RNA
agccccatcaagaggtggat

SEQ ID NO: 517 - RNA, 20 nt, synthetic construct
  source 1..20: mol_type = other RNA
ctactagccccatcaagagg

SEQ ID NO: 518 - RNA, 20 nt, synthetic construct
  source 1..20: mol_type = other RNA
ttccccaatccacctcttga

SEQ ID NO: 519 - RNA, 20 nt, synthetic construct
  source 1..20: mol_type = other RNA
tccccaatccacctcttgat

SEQ ID NO: 520 - RNA, 20 nt, synthetic construct
  source 1..20: mol_type = other RNA
aggctactagccccatcaag

SEQ ID NO: 521 - RNA, 20 nt, synthetic construct
  source 1..20: mol_type = other RNA
ccccaatccacctcttgatg

SEQ ID NO: 522 - RNA, 20 nt, synthetic construct
  source 1..20: mol_type = other RNA
aacaccctatcattaaggaa

SEQ ID NO: 523 - RNA, 20 nt, synthetic construct
  source 1..20: mol_type = other RNA
ctagaaacaccctatcatta

SEQ ID NO: 524 - RNA, 20 nt, synthetic construct
  source 1..20: mol_type = other RNA
agtagcctttccttaatgat

SEQ ID NO: 525 - RNA, 20 nt, synthetic construct
  source 1..20: mol_type = other RNA
gtagcctttccttaatgata

SEQ ID NO: 526 - RNA, 20 nt, synthetic construct
  source 1..20: mol_type = other RNA
tgtttctagagagatatatc

SEQ ID NO: 527 - RNA, 20 nt, synthetic construct
  source 1..20: mol_type = other RNA
tagagagatatatctggtca

SEQ ID NO: 528 - RNA, 20 nt, synthetic construct
  source 1..20: mol_type = other RNA
agagatatatctggtcaagg

SEQ ID NO: 529 - RNA, 20 nt, synthetic construct
  source 1..20: mol_type = other RNA
tatatctggtcaaggtggcc

SEQ ID NO: 530 - RNA, 20 nt, synthetic construct
  source 1..20: mol_type = other RNA
tggggagaaggaggagtacc

SEQ ID NO: 531 - RNA, 20 nt, synthetic construct
  source 1..20: mol_type = other RNA
gggaggctgtggggagaagg

SEQ ID NO: 532 - RNA, 20 nt, synthetic construct
  source 1..20: mol_type = other RNA
tctgggaggctgtggggaga

SEQ ID NO: 533 - RNA, 20 nt, synthetic construct
  source 1..20: mol_type = other RNA
tccttgtctgggaggctgtg

SEQ ID NO: 534 - RNA, 20 nt, synthetic construct
  source 1..20: mol_type = other RNA
ctccttgtctgggaggctgt

SEQ ID NO: 535 - RNA, 20 nt, synthetic construct
  source 1..20: mol_type = other RNA
cctccttgtctgggaggctg

SEQ ID NO: 536 - RNA, 20 nt, synthetic construct
  source 1..20: mol_type = other RNA
gctactcctccttgtctggg

SEQ ID NO: 537 - RNA, 20 nt, synthetic construct
  source 1..20: mol_type = other RNA
tccccacagcctcccagaca

SEQ ID NO: 538 - RNA, 20 nt, synthetic construct
  source 1..20: mol_type = other RNA
gcagctactcctccttgtct

SEQ ID NO: 539 - RNA, 20 nt, synthetic construct
  source 1..20: mol_type = other RNA
ggcagctactcctccttgtc

SEQ ID NO: 540 - RNA, 20 nt, synthetic construct
  source 1..20: mol_type = other RNA
ccacagcctcccagacaagg

SEQ ID NO: 541 - RNA, 20 nt, synthetic construct
  source 1..20: mol_type = other RNA
cagggtacatgatcactaaa

SEQ ID NO: 542 - RNA, 20 nt, synthetic construct
  source 1..20: mol_type = other RNA
tttaaatacacttatattca

SEQ ID NO: 543 - RNA, 20 nt, synthetic construct
  source 1..20: mol_type = other RNA
ttttaaatacacttatattc

SEQ ID NO: 544 - RNA, 20 nt, synthetic construct
  source 1..20: mol_type = other RNA
tagaccatccatggggaagt

SEQ ID NO: 545 - RNA, 20 nt, synthetic construct
  source 1..20: mol_type = other RNA
ctagaccatccatggggaag

SEQ ID NO: 546 - RNA, 20 nt, synthetic construct
  source 1..20: mol_type = other RNA
attttcttcccacttcccca

SEQ ID NO: 547 - RNA, 20 nt, synthetic construct
  source 1..20: mol_type = other RNA
tcttcccacttccccatgga

SEQ ID NO: 548 - RNA, 20 nt, synthetic construct
  source 1..20: mol_type = other RNA
gcatgactagaccatccatg

SEQ ID NO: 549 - RNA, 20 nt, synthetic construct
  source 1..20: mol_type = other RNA
ggcatgactagaccatccat

SEQ ID NO: 550 - RNA, 20 nt, synthetic construct
  source 1..20: mol_type = other RNA
aggcatgactagaccatcca

SEQ ID NO: 551 - RNA, 20 nt, synthetic construct
  source 1..20: mol_type = other RNA
acagtactttccaaaatgag

SEQ ID NO: 552 - RNA, 20 nt, synthetic construct
  source 1..20: mol_type = other RNA
tctagtcatgcctctcattt

SEQ ID NO: 553 - RNA, 20 nt, synthetic construct
  source 1..20: mol_type = other RNA
agtactgtttctgaaacatt

SEQ ID NO: 554 - RNA, 20 nt, synthetic construct
  source 1..20: mol_type = other RNA
taggcaatatattcccaacc

SEQ ID NO: 555 - RNA, 20 nt, synthetic construct
  source 1..20: mol_type = other RNA
tgctgtaaactagccaggtt

SEQ ID NO: 556 - RNA, 20 nt, synthetic construct
  source 1..20: mol_type = other RNA
ttgctgtaaactagccaggt

SEQ ID NO: 557 - RNA, 20 nt, synthetic construct
  source 1..20: mol_type = other RNA
gtgattgctgtaaactagcc

SEQ ID NO: 558 - RNA, 20 nt, synthetic construct
  source 1..20: mol_type = other RNA
tagtttacagcaatcacctg

SEQ ID NO: 559 - RNA, 20 nt, synthetic construct
  source 1..20: mol_type = other RNA
gcgttttaattagcatccac

SEQ ID NO: 560 - RNA, 20 nt, synthetic construct
  source 1..20: mol_type = other RNA
ggagtaatgcatgtgacagt

SEQ ID NO: 561 - RNA, 20 nt, synthetic construct
  source 1..20: mol_type = other RNA
tggagtaatgcatgtgacag

SEQ ID NO: 562 - RNA, 20 nt, synthetic construct
  source 1..20: mol_type = other RNA
tactttccattatgatcaaa

SEQ ID NO: 563 - RNA, 20 nt, synthetic construct
  source 1..20: mol_type = other RNA
attactccatttgatcataa

SEQ ID NO: 564 - RNA, 20 nt, synthetic construct
  source 1..20: mol_type = other RNA
aggtgaggactatggcaaat

SEQ ID NO: 565 - RNA, 20 nt, synthetic construct
  source 1..20: mol_type = other RNA
taggtgaggactatggcaaa

SEQ ID NO: 566 - RNA, 20 nt, synthetic construct
  source 1..20: mol_type = other RNA
acagggataggtgaggacta

SEQ ID NO: 567 - RNA, 20 nt, synthetic construct
  source 1..20: mol_type = other RNA
aaatacaacagggataggtg

SEQ ID NO: 568 - RNA, 20 nt, synthetic construct
  source 1..20: mol_type = other RNA
cgataaaatacaacagggat

SEQ ID NO: 569 - RNA, 20 nt, synthetic construct
  source 1..20: mol_type = other RNA
ggacccgataaaatacaaca

SEQ ID NO: 570 - RNA, 20 nt, synthetic construct
  source 1..20: mol_type = other RNA
tggacccgataaaatacaac

SEQ ID NO: 571 - RNA, 20 nt, synthetic construct
  source 1..20: mol_type = other RNA
ctatccctgttgtattttat

SEQ ID NO: 572 - RNA, 20 nt, synthetic construct
  source 1..20: mol_type = other RNA
tatccctgttgtattttatc

SEQ ID NO: 573 - RNA, 20 nt, synthetic construct
  source 1..20: mol_type = other RNA
aataccttaaatggttgagt

SEQ ID NO: 574 - RNA, 20 nt, synthetic construct
  source 1..20: mol_type = other RNA
gggtccaactcaaccattta

SEQ ID NO: 575 - RNA, 20 nt, synthetic construct
  source 1..20: mol_type = other RNA
gagctggcaaataccttaaa

SEQ ID NO: 576 - RNA, 20 nt, synthetic construct
  source 1..20: mol_type = other RNA
acctaaatgcatacaagagc

SEQ ID NO: 577 - RNA, 20 nt, synthetic construct
  source 1..20: mol_type = other RNA
gccagctcttgtatgcattt

SEQ ID NO: 578 - RNA, 20 nt, synthetic construct
  source 1..20: mol_type = other RNA
gttttttagctcatgaaatt

SEQ ID NO: 579 - RNA, 20 nt, synthetic construct
  source 1..20: mol_type = other RNA
aattaggtacaaagtcagag

SEQ ID NO: 580 - RNA, 20 nt, synthetic construct
  source 1..20: mol_type = other RNA
attaggtacaaagtcagaga

SEQ ID NO: 581 - RNA, 20 nt, synthetic construct
  source 1..20: mol_type = other RNA
ttaggtacaaagtcagagag

SEQ ID NO: 582 - RNA, 20 nt, synthetic construct
  source 1..20: mol_type = other RNA
tacaaagtcagagaggggtc

SEQ ID NO: 583 - RNA, 20 nt, synthetic construct
  source 1..20: mol_type = other RNA
aaacctctttatttctgctg

SEQ ID NO: 584 - RNA, 20 nt, synthetic construct
  source 1..20: mol_type = other RNA
aaacctcagcagaaataaag

SEQ ID NO: 585 - RNA, 20 nt, synthetic construct
  source 1..20: mol_type = other RNA
aataaagaggttttgttgtt

SEQ ID NO: 586 - RNA, 20 nt, synthetic construct
  source 1..20: mol_type = other RNA
tgtttggtaagaacatacct

SEQ ID NO: 587 - RNA, 20 nt, synthetic construct
  source 1..20: mol_type = other RNA
gtttggtaagaacatacctt

SEQ ID NO: 588 - RNA, 20 nt, synthetic construct
  source 1..20: mol_type = other RNA
ggtaagaacataccttgggt

SEQ ID NO: 589 - RNA, 20 nt, synthetic construct
  source 1..20: mol_type = other RNA
caccgtgcccaaccaaccca

SEQ ID NO: 590 - RNA, 20 nt, synthetic construct
  source 1..20: mol_type = other RNA
agaacataccttgggttggt

SEQ ID NO: 591 - RNA, 20 nt, synthetic construct
  source 1..20: mol_type = other RNA
gaacataccttgggttggtt

SEQ ID NO: 592 - RNA, 20 nt, synthetic construct
  source 1..20: mol_type = other RNA
taccttgggttggttgggca

SEQ ID NO: 593 - RNA, 20 nt, synthetic construct
  source 1..20: mol_type = other RNA
cttgggttggttgggcacgg

SEQ ID NO: 594 - RNA, 20 nt, synthetic construct
  source 1..20: mol_type = other RNA
tcccaaagtgttgggattac

SEQ ID NO: 595 - RNA, 20 nt, synthetic construct
  source 1..20: mol_type = other RNA
ccttggcctcccaaagtgtt

SEQ ID NO: 596 - RNA, 20 nt, synthetic construct
  source 1..20: mol_type = other RNA
tgcctgtaatcccaacactt

SEQ ID NO: 597 - RNA, 20 nt, synthetic construct
  source 1..20: mol_type = other RNA
gccttggcctcccaaagtgt

SEQ ID NO: 598 - RNA, 20 nt, synthetic construct
  source 1..20: mol_type = other RNA
gcctgtaatcccaacacttt

SEQ ID NO: 599 - RNA, 20 nt, synthetic construct
  source 1..20: mol_type = other RNA
tgtaatcccaacactttggg

SEQ ID NO: 600 - RNA, 20 nt, synthetic construct
  source 1..20: mol_type = other RNA
cccaacactttgggaggcca

SEQ ID NO: 601 - RNA, 20 nt, synthetic construct
  source 1..20: mol_type = other RNA
acactttgggaggccaaggc

SEQ ID NO: 602 - RNA, 20 nt, synthetic construct
  source 1..20: mol_type = other RNA
ttcaagtgatcagcctgcct

SEQ ID NO: 603 - RNA, 20 nt, synthetic construct
  source 1..20: mol_type = other RNA
gcaggctgatcacttgaagt

SEQ ID NO: 604 - RNA, 20 nt, synthetic construct
  source 1..20: mol_type = other RNA
caggctgatcacttgaagtt

SEQ ID NO: 605 - RNA, 20 nt, synthetic construct
  source 1..20: mol_type = other RNA
ttgggagttcaagaccagcc

SEQ ID NO: 606 - RNA, 20 nt, synthetic construct
  source 1..20: mol_type = other RNA
tttcaccatgttggccaggc

SEQ ID NO: 607 - RNA, 20 nt, synthetic construct
  source 1..20: mol_type = other RNA
gggatttcaccatgttggcc

SEQ ID NO: 608 - RNA, 20 nt, synthetic construct
  source 1..20: mol_type = other RNA
caagaccagcctggccaaca

SEQ ID NO: 609 - RNA, 20 nt, synthetic construct
  source 1..20: mol_type = other RNA
gagacgggatttcaccatgt

SEQ ID NO: 610 - RNA, 20 nt, synthetic construct
  source 1..20: mol_type = other RNA
tttgtattttcagtagagac

SEQ ID NO: 611 - RNA, 20 nt, synthetic construct
  source 1..20: mol_type = other RNA
ttttgtattttcagtagaga

SEQ ID NO: 612 - RNA, 20 nt, synthetic construct
  source 1..20: mol_type = other RNA
tgaaaatacaaaaattaacc

SEQ ID NO: 613 - RNA, 20 nt, synthetic construct
  source 1..20: mol_type = other RNA
atacaaaaattaaccaggca

SEQ ID NO: 614 - RNA, 20 nt, synthetic construct
  source 1..20: mol_type = other RNA
caggcacacaccaccatgcc

SEQ ID NO: 615 - RNA, 20 nt, synthetic construct
  source 1..20: mol_type = other RNA
caaaaattaaccaggcatgg

SEQ ID NO: 616 - RNA, 20 nt, synthetic construct
  source 1..20: mol_type = other RNA
caagtgattcctgggactac

SEQ ID NO: 617 - RNA, 20 nt, synthetic construct
  source 1..20: mol_type = other RNA
tggtgtgtgcctgtagtccc

SEQ ID NO: 618 - RNA, 20 nt, synthetic construct
  source 1..20: mol_type = other RNA
cctgggttcaagtgattcct

SEQ ID NO: 619 - RNA, 20 nt, synthetic construct
  source 1..20: mol_type = other RNA
tcctgggttcaagtgattcc

SEQ ID NO: 620 - RNA, 20 nt, synthetic construct
  source 1..20: mol_type = other RNA
cccaggaatcacttgaaccc

SEQ ID NO: 621 - RNA, 20 nt, synthetic construct
  source 1..20: mol_type = other RNA
aggaatcacttgaacccagg

SEQ ID NO: 622 - RNA, 20 nt, synthetic construct
  source 1..20: mol_type = other RNA
aatcacttgaacccaggagg

SEQ ID NO: 623 - RNA, 20 nt, synthetic construct
  source 1..20: mol_type = other RNA
cactgcaacctccgcctcct

SEQ ID NO: 624 - RNA, 20 nt, synthetic construct
  source 1..20: mol_type = other RNA
tcactgcaacctccgcctcc

SEQ ID NO: 625 - RNA, 20 nt, synthetic construct
  source 1..20: mol_type = other RNA
cacttgaacccaggaggcgg

SEQ ID NO: 626 - RNA, 20 nt, synthetic construct
  source 1..20: mol_type = other RNA
ggctggagtgcagtgtgcag

SEQ ID NO: 627 - RNA, 20 nt, synthetic construct
  source 1..20: mol_type = other RNA
ctgcacactgcactccagcc

SEQ ID NO: 628 - RNA, 20 nt, synthetic construct
  source 1..20: mol_type = other RNA
tgcacactgcactccagcct

SEQ ID NO: 629 - RNA, 20 nt, synthetic construct
  source 1..20: mol_type = other RNA
tctcattccattgcccaggc

SEQ ID NO: 630 - RNA, 20 nt, synthetic construct
  source 1..20: mol_type = other RNA
ctgcactccagcctgggcaa

SEQ ID NO: 631 - RNA, 20 nt, synthetic construct
  source 1..20: mol_type = other RNA
ggaatctcattccattgccc

SEQ ID NO: 632 - RNA, 20 nt, synthetic construct
  source 1..20: mol_type = other RNA
tatttttttattttttggga

SEQ ID NO: 633 - RNA, 20 nt, synthetic construct
  source 1..20: mol_type = other RNA
aaaaaataaagaacatacct

SEQ ID NO: 634 - RNA, 20 nt, synthetic construct
  source 1..20: mol_type = other RNA
aaaaataaagaacatacctt

SEQ ID NO: 635 - RNA, 20 nt, synthetic construct
  source 1..20: mol_type = other RNA
ttcctaagtggatcaaccca

SEQ ID NO: 636 - RNA, 20 nt, synthetic construct
  source 1..20: mol_type = other RNA
taccttgggttgatccactt

SEQ ID NO: 637 - RNA, 20 nt, synthetic construct
  source 1..20: mol_type = other RNA
tattatctgaggttcctaag

SEQ ID NO: 638 - RNA, 20 nt, synthetic construct
  source 1..20: mol_type = other RNA
gtggcagatgttattatctg

SEQ ID NO: 639 - RNA, 20 nt, synthetic construct
  source 1..20: mol_type = other RNA
catagcaattgctctatacg

SEQ ID NO: 640 - RNA, 20 nt, synthetic construct
  source 1..20: mol_type = other RNA
tagagcaattgctatgtccc

SEQ ID NO: 641 - RNA, 20 nt, synthetic construct
  source 1..20: mol_type = other RNA
aagtgtctagtagagtgcct

SEQ ID NO: 642 - RNA, 20 nt, synthetic construct
  source 1..20: mol_type = other RNA
gaagtgtctagtagagtgcc

SEQ ID NO: 643 - RNA, 20 nt, synthetic construct
  source 1..20: mol_type = other RNA
atacagtttagaaaatcaga

SEQ ID NO: 644 - RNA, 20 nt, synthetic construct
  source 1..20: mol_type = other RNA
tacagtttagaaaatcagat

SEQ ID NO: 645 - RNA, 20 nt, synthetic construct
  source 1..20: mol_type = other RNA
aatcagatgggtgtagatca

SEQ ID NO: 646 - RNA, 20 nt, synthetic construct
  source 1..20: mol_type = other RNA
agatgggtgtagatcaaggc

SEQ ID NO: 647 - RNA, 20 nt, synthetic construct
  source 1..20: mol_type = other RNA
gtgtagatcaaggcaggagc

SEQ ID NO: 648 - RNA, 20 nt, synthetic construct
  source 1..20: mol_type = other RNA
tatgtttatgcctttctttt

SEQ ID NO: 649 - RNA, 20 nt, synthetic construct
  source 1..20: mol_type = other RNA
ggagcaggaaccaaaaagaa

SEQ ID NO: 650 - RNA, 20 nt, synthetic construct
  source 1..20: mol_type = other RNA
cataaacataagaaaaaaaa

SEQ ID NO: 651 - RNA, 20 nt, synthetic construct
  source 1..20: mol_type = other RNA
aacataagaaaaaaaatgga

SEQ ID NO: 652 - RNA, 20 nt, synthetic construct
  source 1..20: mol_type = other RNA
acataagaaaaaaaatggaa

SEQ ID NO: 653 - RNA, 20 nt, synthetic construct
  source 1..20: mol_type = other RNA
cataagaaaaaaaatggaag

SEQ ID NO: 654 - RNA, 20 nt, synthetic construct
  source 1..20: mol_type = other RNA
aagaaaaaaaatggaagggg

SEQ ID NO: 655 - RNA, 20 nt, synthetic construct
  source 1..20: mol_type = other RNA
caataacatgagtaatttga

SEQ ID NO: 656 - RNA, 20 nt, synthetic construct
  source 1..20: mol_type = other RNA
aataacatgagtaatttgat

SEQ ID NO: 657 - RNA, 20 nt, synthetic construct
  source 1..20: mol_type = other RNA
ataacatgagtaatttgatg

SEQ ID NO: 658 - RNA, 20 nt, synthetic construct
  source 1..20: mol_type = other RNA
taacatgagtaatttgatgg

SEQ ID NO: 659 - RNA, 20 nt, synthetic construct
  source 1..20: mol_type = other RNA
atgaactttgaaaagtatct

SEQ ID NO: 660 - RNA, 20 nt, synthetic construct
  source 1..20: mol_type = other RNA
tgaactttgaaaagtatctt

SEQ ID NO: 661 - RNA, 20 nt, synthetic construct
  source 1..20: mol_type = other RNA
gaactttgaaaagtatcttg

SEQ ID NO: 662 - RNA, 20 nt, synthetic construct
  source 1..20: mol_type = other RNA
actcaagagtctacatgatt

SEQ ID NO: 663 - RNA, 20 nt, synthetic construct
  source 1..20: mol_type = other RNA
gactcttgagtgatgtgtta

SEQ ID NO: 664 - RNA, 20 nt, synthetic construct
  source 1..20: mol_type = other RNA
ggaatgctatgagtgctgag

SEQ ID NO: 665 - RNA, 20 nt, synthetic construct
  source 1..20: mol_type = other RNA
gaatgctatgagtgctgaga

SEQ ID NO: 666 - RNA, 20 nt, synthetic construct
  source 1..20: mol_type = other RNA
cctttctctggaggctctca

SEQ ID NO: 667 - RNA, 20 nt, synthetic construct
  source 1..20: mol_type = other RNA
ttttaagagcctttctctgg

SEQ ID NO: 668 - RNA, 20 nt, synthetic construct
  source 1..20: mol_type = other RNA
ccttgagagcctccagagaa

SEQ ID NO: 669 - RNA, 20 nt, synthetic construct
  source 1..20: mol_type = other RNA
catttttaagagcctttctc

SEQ ID NO: 670 - RNA, 20 nt, synthetic construct
  source 1..20: mol_type = other RNA
ctagcagtatcttctgtcac

SEQ ID NO: 671 - RNA, 20 nt, synthetic construct
  source 1..20: mol_type = other RNA
tgctagaaaaaaaacaaaaa

SEQ ID NO: 672 - RNA, 20 nt, synthetic construct
  source 1..20: mol_type = other RNA
aacaaaaaaggcatgtatag

SEQ ID NO: 673 - RNA, 20 nt, synthetic construct
  source 1..20: mol_type = other RNA
gcatgtatagaggaattatg

SEQ ID NO: 674 - RNA, 20 nt, synthetic construct
  source 1..20: mol_type = other RNA
catgtatagaggaattatga

SEQ ID NO: 675 - RNA, 20 nt, synthetic construct
  source 1..20: mol_type = other RNA
gagggaaagataccaagtca

SEQ ID NO: 676 - RNA, 20 nt, synthetic construct
  source 1..20: mol_type = other RNA
ttgaagaataaaccgtgact

SEQ ID NO: 677 - RNA, 20 nt, synthetic construct
  source 1..20: mol_type = other RNA
tcacggtttattcttcaaaa

SEQ ID NO: 678 - RNA, 20 nt, synthetic construct
  source 1..20: mol_type = other RNA
cggtttattcttcaaaatgg

SEQ ID NO: 679 - RNA, 20 nt, synthetic construct
  source 1..20: mol_type = other RNA
tttattcttcaaaatggagg

SEQ ID NO: 680 - RNA, 20 nt, synthetic construct
  source 1..20: mol_type = other RNA
tcaaaatggaggtggcttgt

SEQ ID NO: 681 - RNA, 20 nt, synthetic construct
  source 1..20: mol_type = other RNA
caaaatggaggtggcttgtt

SEQ ID NO: 682 - RNA, 20 nt, synthetic construct
  source 1..20: mol_type = other RNA
atggaggtggcttgttggga

SEQ ID NO: 683 - RNA, 20 nt, synthetic construct
  source 1..20: mol_type = other RNA
gaggtggcttgttgggaagg

SEQ ID NO: 684 - RNA, 20 nt, synthetic construct
  source 1..20: mol_type = other RNA
tgggaaggtggaagctcatt

SEQ ID NO: 685 - RNA, 20 nt, synthetic construct
  source 1..20: mol_type = other RNA
ggaagctcatttggccagag

SEQ ID NO: 686 - RNA, 20 nt, synthetic construct
  source 1..20: mol_type = other RNA
tcccaattccatttccactc

SEQ ID NO: 687 - RNA, 20 nt, synthetic construct
  source 1..20: mol_type = other RNA
tcatttggccagagtggaaa

SEQ ID NO: 688 - RNA, 20 nt, synthetic construct
  source 1..20: mol_type = other RNA
ggccagagtggaaatggaat

SEQ ID NO: 689 - RNA, 20 nt, synthetic construct
  source 1..20: mol_type = other RNA
gccagagtggaaatggaatt

SEQ ID NO: 690 - RNA, 20 nt, synthetic construct
  source 1..20: mol_type = other RNA
aggcaccaagtgtttacatt

SEQ ID NO: 691 - RNA, 20 nt, synthetic construct
  source 1..20: mol_type = other RNA
gatgaccaaatgtaaacact

SEQ ID NO: 692 - RNA, 20 nt, synthetic construct
  source 1..20: mol_type = other RNA
acttggtgtcaagctatatc

SEQ ID NO: 693 - RNA, 20 nt, synthetic construct
  source 1..20: mol_type = other RNA
tatttcacttggggctaact

SEQ ID NO: 694 - RNA, 20 nt, synthetic construct
  source 1..20: mol_type = other RNA
ttgccagggtatttcacttg

SEQ ID NO: 695 - RNA, 20 nt, synthetic construct
  source 1..20: mol_type = other RNA
attgccagggtatttcactt

SEQ ID NO: 696 - RNA, 20 nt, synthetic construct
  source 1..20: mol_type = other RNA
tattgccagggtatttcact

SEQ ID NO: 697 - RNA, 20 nt, synthetic construct
  source 1..20: mol_type = other RNA
tagccccaagtgaaataccc

SEQ ID NO: 698 - RNA, 20 nt, synthetic construct
  source 1..20: mol_type = other RNA
aagacacattaatattgcca

SEQ ID NO: 699 - RNA, 20 nt, synthetic construct
  source 1..20: mol_type = other RNA
aaagacacattaatattgcc

SEQ ID NO: 700 - RNA, 20 nt, synthetic construct
  source 1..20: mol_type = other RNA
tggagtacctgaggaatatc

SEQ ID NO: 701 - RNA, 20 nt, synthetic construct
  source 1..20: mol_type = other RNA
ttggagtacctgaggaatat

SEQ ID NO: 702 - RNA, 20 nt, synthetic construct
  source 1..20: mol_type = other RNA
gtcttttcccgatattcctc

SEQ ID NO: 703 - RNA, 20 nt, synthetic construct
  source 1..20: mol_type = other RNA
ctgaatctttggagtacctg

SEQ ID NO: 704 - RNA, 20 nt, synthetic construct
  source 1..20: mol_type = other RNA
cgtgagtaaacctgaatctt

SEQ ID NO: 705 - RNA, 20 nt, synthetic construct
  source 1..20: mol_type = other RNA
ctcaggtactccaaagattc

SEQ ID NO: 706 - RNA, 20 nt, synthetic construct
  source 1..20: mol_type = other RNA
tttgactttccattctctgc

SEQ ID NO: 707 - RNA, 20 nt, synthetic construct
  source 1..20: mol_type = other RNA
tcacgtcatccagcagagaa

SEQ ID NO: 708 - RNA, 20 nt, synthetic construct
  source 1..20: mol_type = other RNA
acccagacacatagcaattc

SEQ ID NO: 709 - RNA, 20 nt, synthetic construct
  source 1..20: mol_type = other RNA
ttcctgaattgctatgtgtc

SEQ ID NO: 710 - RNA, 20 nt, synthetic construct
  source 1..20: mol_type = other RNA
tcctgaattgctatgtgtct

SEQ ID NO: 711 - RNA, 20 nt, synthetic construct
  source 1..20: mol_type = other RNA
aagtcaacttcaatgtcgga

SEQ ID NO: 712 - RNA, 20 nt, synthetic construct
  source 1..20: mol_type = other RNA
cagtaagtcaacttcaatgt

SEQ ID NO: 713 - RNA, 20 nt, synthetic construct
  source 1..20: mol_type = other RNA
gaagttgacttactgaagaa

SEQ ID NO: 714 - RNA, 20 nt, synthetic construct
  source 1..20: mol_type = other RNA
tggagagagaattgaaaaag

SEQ ID NO: 715 - RNA, 20 nt, synthetic construct
  source 1..20: mol_type = other RNA
ttcagacttgtctttcagca

SEQ ID NO: 716 - RNA, 20 nt, synthetic construct
  source 1..20: mol_type = other RNA
acttgtctttcagcaaggac

SEQ ID NO: 717 - RNA, 20 nt, synthetic construct
  source 1..20: mol_type = other RNA
atactcatctttttcagtgg

SEQ ID NO: 718 - RNA, 20 nt, synthetic construct
  source 1..20: mol_type = other RNA
catactcatctttttcagtg

SEQ ID NO: 719 - RNA, 20 nt, synthetic construct
  source 1..20: mol_type = other RNA
gcatactcatctttttcagt

SEQ ID NO: 720 - RNA, 20 nt, synthetic construct
  source 1..20: mol_type = other RNA
ggcatactcatctttttcag

SEQ ID NO: 721 - RNA, 20 nt, synthetic construct
  source 1..20: mol_type = other RNA
agtcacatggttcacacggc

SEQ ID NO: 722 - RNA, 20 nt, synthetic construct
  source 1..20: mol_type = other RNA
acaaagtcacatggttcaca

SEQ ID NO: 723 - RNA, 20 nt, synthetic construct
  source 1..20: mol_type = other RNA
tgggctgtgacaaagtcaca

SEQ ID NO: 724 - RNA, 20 nt, synthetic construct
  source 1..20: mol_type = other RNA
ttaccccacttaactatctt

SEQ ID NO: 725 - RNA, 20 nt, synthetic construct
  source 1..20: mol_type = other RNA
cttaccccacttaactatct

SEQ ID NO: 726 - RNA, 20 nt, synthetic construct
  source 1..20: mol_type = other RNA
cacagcccaagatagttaag

SEQ ID NO: 727 - RNA, 20 nt, synthetic construct
  source 1..20: mol_type = other RNA
acagcccaagatagttaagt

SEQ ID NO: 728 - RNA, 20 nt, synthetic construct
  source 1..20: mol_type = other RNA
cagcccaagatagttaagtg

SEQ ID NO: 729 - RNA, 20 nt, synthetic construct
  source 1..20: mol_type = other RNA
aagctgctttgatataaaaa

SEQ ID NO: 730 - RNA, 20 nt, synthetic construct
  source 1..20: mol_type = other RNA
tttgatataaaaaaggtcta

SEQ ID NO: 731 - RNA, 20 nt, synthetic construct
  source 1..20: mol_type = other RNA
gggactcattcagggtagta

SEQ ID NO: 732 - RNA, 20 nt, synthetic construct
  source 1..20: mol_type = other RNA
gatgggatgggactcattca

SEQ ID NO: 733 - RNA, 20 nt, synthetic construct
  source 1..20: mol_type = other RNA
agatgggatgggactcattc

SEQ ID NO: 734 - RNA, 20 nt, synthetic construct
  source 1..20: mol_type = other RNA
ttgtttatatcagatgggat

SEQ ID NO: 735 - RNA, 20 nt, synthetic construct
  source 1..20: mol_type = other RNA
attgtttatatcagatggga

SEQ ID NO: 736 - RNA, 20 nt, synthetic construct
  source 1..20: mol_type = other RNA
gcagattgtttatatcagat

SEQ ID NO: 737 - RNA, 20 nt, synthetic construct
  source 1..20: mol_type = other RNA
tgcagattgtttatatcaga

SEQ ID NO: 738 - RNA, 20 nt, synthetic construct
  source 1..20: mol_type = other RNA
gatataaacaatctgcatat

SEQ ID NO: 739 - RNA, 20 nt, synthetic construct
  source 1..20: mol_type = other RNA
atataaacaatctgcatatt

SEQ ID NO: 740 - RNA, 20 nt, synthetic construct
  source 1..20: mol_type = other RNA
atctgcatattgggattgtc

SEQ ID NO: 741 - RNA, 20 nt, synthetic construct
  source 1..20: mol_type = other RNA
tctgcatattgggattgtca

SEQ ID NO: 742 - RNA, 20 nt, synthetic construct
  source 1..20: mol_type = other RNA
gttcttaaagatcagattag

SEQ ID NO: 743 - RNA, 20 nt, synthetic construct
  source 1..20: mol_type = other RNA
ctgtgcatcagtatctcagc

SEQ ID NO: 744 - RNA, 20 nt, synthetic construct
  source 1..20: mol_type = other RNA
tgagatactgatgcacagca

SEQ ID NO: 745 - RNA, 20 nt, synthetic construct
  source 1..20: mol_type = other RNA
ctcaactgcagggaaactac

SEQ ID NO: 746 - RNA, 20 nt, synthetic construct
  source 1..20: mol_type = other RNA
ctgctccctgctcaactgca

SEQ ID NO: 747 - RNA, 20 nt, synthetic construct
  source 1..20: mol_type = other RNA
gctgctccctgctcaactgc

SEQ ID NO: 748 - RNA, 20 nt, synthetic construct
  source 1..20: mol_type = other RNA
tagtttccctgcagttgagc

SEQ ID NO: 749 - RNA, 20 nt, synthetic construct
  source 1..20: mol_type = other RNA
agtttccctgcagttgagca

SEQ ID NO: 750 - RNA, 20 nt, synthetic construct
  source 1..20: mol_type = other RNA
tcttaacacttcttacctac

SEQ ID NO: 751 - RNA, 20 nt, synthetic construct
  source 1..20: mol_type = other RNA
aaaagctagaggaagccagt

SEQ ID NO: 752 - RNA, 20 nt, synthetic construct
  source 1..20: mol_type = other RNA
gaagctgccacaaaagctag

SEQ ID NO: 753 - RNA, 20 nt, synthetic construct
  source 1..20: mol_type = other RNA
ctggcttcctctagcttttg

SEQ ID NO: 754 - RNA, 20 nt, synthetic construct
  source 1..20: mol_type = other RNA
ctagcttttgtggcagcttc

SEQ ID NO: 755 - RNA, 20 nt, synthetic construct
  source 1..20: mol_type = other RNA
actgaacgaacatctcaaga

SEQ ID NO: 756 - RNA, 20 nt, synthetic construct
  source 1..20: mol_type = other RNA
cgaacatctcaagaaggtat

SEQ ID NO: 757 - RNA, 20 nt, synthetic construct
  source 1..20: mol_type = other RNA
acagcaggacttacaaacaa

SEQ ID NO: 758 - RNA, 20 nt, synthetic construct
  source 1..20: mol_type = other RNA
ttataggatgctaggacagc

SEQ ID NO: 759 - RNA, 20 nt, synthetic construct
  source 1..20: mol_type = other RNA
gtccaggattataggatgct

SEQ ID NO: 760 - RNA, 20 nt, synthetic construct
  source 1..20: mol_type = other RNA
ctggagaagtccaggattat

SEQ ID NO: 761 - RNA, 20 nt, synthetic construct
  source 1..20: mol_type = other RNA
gtcctagcatcctataatcc

SEQ ID NO: 762 - RNA, 20 nt, synthetic construct
  source 1..20: mol_type = other RNA
agaaagtactggagaagtcc

SEQ ID NO: 763 - RNA, 20 nt, synthetic construct
  source 1..20: mol_type = other RNA
ccaatccagccagaaagtac

SEQ ID NO: 764 - RNA, 20 nt, synthetic construct
  source 1..20: mol_type = other RNA
tggacttctccagtactttc

SEQ ID NO: 765 - RNA, 20 nt, synthetic construct
  source 1..20: mol_type = other RNA
cttctccagtactttctggc

SEQ ID NO: 766 - RNA, 20 nt, synthetic construct
  source 1..20: mol_type = other RNA
ccagtactttctggctggat

SEQ ID NO: 767 - RNA, 20 nt, synthetic construct
  source 1..20: mol_type = other RNA
tctggctggattggtatctg

SEQ ID NO: 768 - RNA, 20 nt, synthetic construct
  source 1..20: mol_type = other RNA
gattggtatctgaggctagt

SEQ ID NO: 769 - RNA, 20 nt, synthetic construct
  source 1..20: mol_type = other RNA
ggtatctgaggctagtagga

SEQ ID NO: 770 - RNA, 20 nt, synthetic construct
  source 1..20: mol_type = other RNA
gtatctgaggctagtaggaa

SEQ ID NO: 771 - RNA, 20 nt, synthetic construct
  source 1..20: mol_type = other RNA
taggaagggcttgttcctgc

SEQ ID NO: 772 - RNA, 20 nt, synthetic construct
  source 1..20: mol_type = other RNA
aggaagggcttgttcctgct

SEQ ID NO: 773 - RNA, 20 nt, synthetic construct
  source 1..20: mol_type = other RNA
attgtttagagctacccagc

SEQ ID NO: 774 - RNA, 20 nt, synthetic construct
  source 1..20: mol_type = other RNA
agctctaaacaatgtattca

SEQ ID NO: 775 - RNA, 20 nt, synthetic construct
  source 1..20: mol_type = other RNA
gctctaaacaatgtattcat

SEQ ID NO: 776 - RNA, 20 nt, synthetic construct
  source 1..20: mol_type = other RNA
taaacaatgtattcatgggt

SEQ ID NO: 777 - RNA, 20 nt, synthetic construct
  source 1..20: mol_type = other RNA
agaaataaggctggcagaat

SEQ ID NO: 778 - RNA, 20 nt, synthetic construct
  source 1..20: mol_type = other RNA
aaaatggttagaaataaggc

SEQ ID NO: 779 - RNA, 20 nt, synthetic construct
  source 1..20: mol_type = other RNA
gtctaaaatggttagaaata

SEQ ID NO: 780 - RNA, 20 nt, synthetic construct
  source 1..20: mol_type = other RNA
gtactaacaaatgtctaaaa

SEQ ID NO: 781 - RNA, 20 nt, synthetic construct
  source 1..20: mol_type = other RNA
tttagacatttgttagtaca

SEQ ID NO: 782 - RNA, 20 nt, synthetic construct
  source 1..20: mol_type = other RNA
aaagacagtggagaaaaaaa

SEQ ID NO: 783 - RNA, 20 nt, synthetic construct
  source 1..20: mol_type = other RNA
tcgatctatgaaaaagacag

SEQ ID NO: 784 - RNA, 20 nt, synthetic construct
  source 1..20: mol_type = other RNA
gagacatgtaagcagcatca

SEQ ID NO: 785 - RNA, 20 nt, synthetic construct
  source 1..20: mol_type = other RNA
acatgtaagcagcatcatgg

SEQ ID NO: 786 - RNA, 20 nt, synthetic construct
  source 1..20: mol_type = other RNA
gaaacaaaaacattttctca

SEQ ID NO: 787 - RNA, 20 nt, synthetic construct
  source 1..20: mol_type = other RNA
gtttttgtttcactgtcctg

SEQ ID NO: 788 - RNA, 20 nt, synthetic construct
  source 1..20: mol_type = other RNA
gctgtctataaatagtcctc

SEQ ID NO: 789 - RNA, 20 nt, synthetic construct
  source 1..20: mol_type = other RNA
caatgttctccacatagtga

SEQ ID NO: 790 - RNA, 20 nt, synthetic construct
  source 1..20: mol_type = other RNA
tcaatgttctccacatagtg

SEQ ID NO: 791 - RNA, 20 nt, synthetic construct
  source 1..20: mol_type = other RNA
acatgataaccctcactatg

SEQ ID NO: 792 - RNA, 20 nt, synthetic construct
  source 1..20: mol_type = other RNA
tgacagagtaacattttagc

SEQ ID NO: 793 - RNA, 20 nt, synthetic construct
  source 1..20: mol_type = other RNA
gacagagtaacattttagca

SEQ ID NO: 794 - RNA, 20 nt, synthetic construct
  source 1..20: mol_type = other RNA
agaagggaacatgaccctgt

SEQ ID NO: 795 - RNA, 20 nt, synthetic construct
  source 1..20: mol_type = other RNA
catgccactccacaggagaa

SEQ ID NO: 796 - RNA, 20 nt, synthetic construct
  source 1..20: mol_type = other RNA
tcatgccactccacaggaga

SEQ ID NO: 797 - RNA, 20 nt, synthetic construct
  source 1..20: mol_type = other RNA
ggtcatgttcccttctcctg

SEQ ID NO: 798 - RNA, 20 nt, synthetic construct
  source 1..20: mol_type = other RNA
tgttcccttctcctgtggag

SEQ ID NO: 799 - RNA, 20 nt, synthetic construct
  source 1..20: mol_type = other RNA
ccttcttcatgccactccac

SEQ ID NO: 800 - RNA, 20 nt, synthetic construct
  source 1..20: mol_type = other RNA
cctgtggagtggcatgaaga

SEQ ID NO: 801 - RNA, 20 nt, synthetic construct
  source 1..20: mol_type = other RNA
agtggcatgaagaaggtgta

SEQ ID NO: 802 - RNA, 20 nt, synthetic construct
  source 1..20: mol_type = other RNA
tgaagaaggtgtatggcccc

SEQ ID NO: 803 - RNA, 20 nt, synthetic construct
  source 1..20: mol_type = other RNA
aaggtgtatggccccaggta

SEQ ID NO: 804 - RNA, 20 nt, synthetic construct
  source 1..20: mol_type = other RNA
cagtaatatggccatacctg

SEQ ID NO: 805 - RNA, 20 nt, synthetic construct
  source 1..20: mol_type = other RNA
tcagtaatatggccatacct

SEQ ID NO: 806 - RNA, 20 nt, synthetic construct
  source 1..20: mol_type = other RNA
gtcagtaatatggccatacc

SEQ ID NO: 807 - RNA, 20 nt, synthetic construct
  source 1..20: mol_type = other RNA
tctgtagagggtcagtaata

SEQ ID NO: 808 - RNA, 20 nt, synthetic construct
  source 1..20: mol_type = other RNA
tcctttgccctctctgtaga

SEQ ID NO: 809 - RNA, 20 nt, synthetic construct
  source 1..20: mol_type = other RNA
ttcctttgccctctctgtag

SEQ ID NO: 810 - RNA, 20 nt, synthetic construct
  source 1..20: mol_type = other RNA
attactgaccctctacagag

SEQ ID NO: 811 - RNA, 20 nt, synthetic construct
  source 1..20: mol_type = other RNA
ttactgaccctctacagaga

SEQ ID NO: 812 - RNA, 20 nt, synthetic construct
  source 1..20: mol_type = other RNA
accctctacagagagggcaa

SEQ ID NO: 813 - RNA, 20 nt, synthetic construct
  source 1..20: mol_type = other RNA
gggcaaaggaactgccagta

SEQ ID NO: 814 - RNA, 20 nt, synthetic construct
  source 1..20: mol_type = other RNA
tttatcctgcaataccatac

SEQ ID NO: 815 - RNA, 20 nt, synthetic construct
  source 1..20: mol_type = other RNA
aactgccagtatggtattgc

SEQ ID NO: 816 - RNA, 20 nt, synthetic construct
  source 1..20: mol_type = other RNA
agtatggtattgcaggataa

SEQ ID NO: 817 - RNA, 20 nt, synthetic construct
  source 1..20: mol_type = other RNA
tggtattgcaggataaaggc

SEQ ID NO: 818 - RNA, 20 nt, synthetic construct
  source 1..20: mol_type = other RNA
tattgcaggataaaggcagg

SEQ ID NO: 819 - RNA, 20 nt, synthetic construct
  source 1..20: mol_type = other RNA
caaagccttgcaggtaatgt

SEQ ID NO: 820 - RNA, 20 nt, synthetic construct
  source 1..20: mol_type = other RNA
tcaaagccttgcaggtaatg

SEQ ID NO: 821 - RNA, 20 nt, synthetic construct
  source 1..20: mol_type = other RNA
ggttacccacattacctgca

SEQ ID NO: 822 - RNA, 20 nt, synthetic construct
  source 1..20: mol_type = other RNA
aagaaagatcaaagccttgc

SEQ ID NO: 823 - RNA, 20 nt, synthetic construct
  source 1..20: mol_type = other RNA
agagatgtccaatgtggaaa

SEQ ID NO: 824 - RNA, 20 nt, synthetic construct
  source 1..20: mol_type = other RNA
ttcttctgccatttccacat

SEQ ID NO: 825 - RNA, 20 nt, synthetic construct
  source 1..20: mol_type = other RNA
ctcagcagagatgtccaatg

SEQ ID NO: 826 - RNA, 20 nt, synthetic construct
  source 1..20: mol_type = other RNA
cacattggacatctctgctg

SEQ ID NO: 827 - RNA, 20 nt, synthetic construct
  source 1..20: mol_type = other RNA
cattatacaaaggaaaagag

SEQ ID NO: 828 - RNA, 20 nt, synthetic construct
  source 1..20: mol_type = other RNA
aataaaacaacattatacaa

SEQ ID NO: 829 - RNA, 20 nt, synthetic construct
  source 1..20: mol_type = other RNA
ttattcttcagacagaagag

SEQ ID NO: 830 - RNA, 20 nt, synthetic construct
  source 1..20: mol_type = other RNA
cacagtccccatacaggaat

SEQ ID NO: 831 - RNA, 20 nt, synthetic construct
  source 1..20: mol_type = other RNA
acacagtccccatacaggaa

SEQ ID NO: 832 - RNA, 20 nt, synthetic construct
  source 1..20: mol_type = other RNA
gcagacatcccattcctgta

SEQ ID NO: 833 - RNA, 20 nt, synthetic construct
  source 1..20: mol_type = other RNA
cagacatcccattcctgtat

SEQ ID NO: 834 - RNA, 20 nt, synthetic construct
  source 1..20: mol_type = other RNA
agacatcccattcctgtatg

SEQ ID NO: 835 - RNA, 20 nt, synthetic construct
  source 1..20: mol_type = other RNA
ggcaaacacagtccccatac

SEQ ID NO: 836 - RNA, 20 nt, synthetic construct
  source 1..20: mol_type = other RNA
ggactgtgtttgcctcttag

SEQ ID NO: 837 - RNA, 20 nt, synthetic construct
  source 1..20: mol_type = other RNA
gtggcctgggaacctctaag

SEQ ID NO: 838 - RNA, 20 nt, synthetic construct
  source 1..20: mol_type = other RNA
tttgcctcttagaggttccc

SEQ ID NO: 839 - RNA, 20 nt, synthetic construct
  source 1..20: mol_type = other RNA
tttatctcctctagtggcct

SEQ ID NO: 840 - RNA, 20 nt, synthetic construct
  source 1..20: mol_type = other RNA
ctttatctcctctagtggcc

SEQ ID NO: 841 - RNA, 20 nt, synthetic construct
  source 1..20: mol_type = other RNA
agaggttcccaggccactag

SEQ ID NO: 842 - RNA, 20 nt, synthetic construct
  source 1..20: mol_type = other RNA
tttccctttatctcctctag

SEQ ID NO: 843 - RNA, 20 nt, synthetic construct
  source 1..20: mol_type = other RNA
caggccactagaggagataa

SEQ ID NO: 844 - RNA, 20 nt, synthetic construct
  source 1..20: mol_type = other RNA
aggccactagaggagataaa

SEQ ID NO: 845 - RNA, 20 nt, synthetic construct
  source 1..20: mol_type = other RNA
ctataatagatgtaactaca

SEQ ID NO: 846 - RNA, 20 nt, synthetic construct
  source 1..20: mol_type = other RNA
tcctccctctctcttgcttc

SEQ ID NO: 847 - RNA, 20 nt, synthetic construct
  source 1..20: mol_type = other RNA
gagctccagaagcaagagag

SEQ ID NO: 848 - RNA, 20 nt, synthetic construct
  source 1..20: mol_type = other RNA
agctccagaagcaagagaga

SEQ ID NO: 849 - RNA, 20 nt, synthetic construct
  source 1..20: mol_type = other RNA
tccagaagcaagagagaggg

SEQ ID NO: 850 - RNA, 20 nt, synthetic construct
  source 1..20: mol_type = other RNA
gcaagagagagggaggaact

SEQ ID NO: 851 - RNA, 20 nt, synthetic construct
  source 1..20: mol_type = other RNA
gacttctctgcatctttagt

SEQ ID NO: 852 - RNA, 20 nt, synthetic construct
  source 1..20: mol_type = other RNA
catctttagttggagtccaa

SEQ ID NO: 853 - RNA, 20 nt, synthetic construct
  source 1..20: mol_type = other RNA
gaatttcattgaaaagcctt

SEQ ID NO: 854 - RNA, 20 nt, synthetic construct
  source 1..20: mol_type = other RNA
tcaatgaaattctactgccc

SEQ ID NO: 855 - RNA, 20 nt, synthetic construct
  source 1..20: mol_type = other RNA
caatgaaattctactgccca

SEQ ID NO: 856 - RNA, 20 nt, synthetic construct
  source 1..20: mol_type = other RNA
tttcagcatcaatgtaccct

SEQ ID NO: 857 - RNA, 20 nt, synthetic construct
  source 1..20: mol_type = other RNA
gtttcagcatcaatgtaccc

SEQ ID NO: 858 - RNA, 20 nt, synthetic construct
  source 1..20: mol_type = other RNA
tataacaggagatttgaatg

SEQ ID NO: 859 - RNA, 20 nt, synthetic construct
  source 1..20: mol_type = other RNA
atataacaggagatttgaat

SEQ ID NO: 860 - RNA, 20 nt, synthetic construct
  source 1..20: mol_type = other RNA
aatataacaggagatttgaa

SEQ ID NO: 861 - RNA, 20 nt, synthetic construct
  source 1..20: mol_type = other RNA
tccctgttctagaatataac

SEQ ID NO: 862 - RNA, 20 nt, synthetic construct
  source 1..20: mol_type = other RNA
ctcctgttatattctagaac

SEQ ID NO: 863 - RNA, 20 nt, synthetic construct
  source 1..20: mol_type = other RNA
tcctgttatattctagaaca

SEQ ID NO: 864 - RNA, 20 nt, synthetic construct
  source 1..20: mol_type = other RNA
tctagaacagggaattgatt

SEQ ID NO: 865 - RNA, 20 nt, synthetic construct
  source 1..20: mol_type = other RNA
ctagaacagggaattgattt

SEQ ID NO: 866 - RNA, 20 nt, synthetic construct
  source 1..20: mol_type = other RNA
aattgatttgggagagcatc

SEQ ID NO: 867 - RNA, 20 nt, synthetic construct
  source 1..20: mol_type = other RNA
gatttgggagagcatcagga

SEQ ID NO: 868 - RNA, 20 nt, synthetic construct
  source 1..20: mol_type = other RNA
ttgggagagcatcaggaagg

SEQ ID NO: 869 - RNA, 20 nt, synthetic construct
  source 1..20: mol_type = other RNA
aatttactaacagtgtgact

SEQ ID NO: 870 - RNA, 20 nt, synthetic construct
  source 1..20: mol_type = other RNA
caatttactaacagtgtgac

SEQ ID NO: 871 - RNA, 20 nt, synthetic construct
  source 1..20: mol_type = other RNA
tgttagtaaattgtagagcc

SEQ ID NO: 872 - RNA, 20 nt, synthetic construct
  source 1..20: mol_type = other RNA
ctatattagagttcaggtcc

SEQ ID NO: 873 - RNA, 20 nt, synthetic construct
  source 1..20: mol_type = other RNA
acatgactatattagagttc

SEQ ID NO: 874 - RNA, 20 nt, synthetic construct
  source 1..20: mol_type = other RNA
agtcatgtgttacttaatga

SEQ ID NO: 875 - RNA, 20 nt, synthetic construct
  source 1..20: mol_type = other RNA
gtcatgtgttacttaatgac

SEQ ID NO: 876 - RNA, 20 nt, synthetic construct
  source 1..20: mol_type = other RNA
tcatgtgttacttaatgacg

SEQ ID NO: 877 - RNA, 20 nt, synthetic construct
  source 1..20: mol_type = other RNA
agaaatgcttacacaaacct

SEQ ID NO: 878 - RNA, 20 nt, synthetic construct
  source 1..20: mol_type = other RNA
tgtagtaggctacaacacct

SEQ ID NO: 879 - RNA, 20 nt, synthetic construct
  source 1..20: mol_type = other RNA
atgtagcctatgcgtgtagt

SEQ ID NO: 880 - RNA, 20 nt, synthetic construct
  source 1..20: mol_type = other RNA
ttgtagcctactacacgcat

SEQ ID NO: 881 - RNA, 20 nt, synthetic construct
  source 1..20: mol_type = other RNA
tactacacgcataggctaca

SEQ ID NO: 882 - RNA, 20 nt, synthetic construct
  source 1..20: mol_type = other RNA
gtttgtagtctaggagcaat

SEQ ID NO: 883 - RNA, 20 nt, synthetic construct
  source 1..20: mol_type = other RNA
gctgtacaggtttgtagtct

SEQ ID NO: 884 - RNA, 20 nt, synthetic construct
  source 1..20: mol_type = other RNA
agtacagtaacaggctgtac

SEQ ID NO: 885 - RNA, 20 nt, synthetic construct
  source 1..20: mol_type = other RNA
acagtattcagtacagtaac

SEQ ID NO: 886 - RNA, 20 nt, synthetic construct
  source 1..20: mol_type = other RNA
tgttactgtactgaatactg

SEQ ID NO: 887 - RNA, 20 nt, synthetic construct
  source 1..20: mol_type = other RNA
gttactgtactgaatactgt

SEQ ID NO: 888 - RNA, 20 nt, synthetic construct
  source 1..20: mol_type = other RNA
tgtgggcagttgtaacacaa

SEQ ID NO: 889 - RNA, 20 nt, synthetic construct
  source 1..20: mol_type = other RNA
atggactgtatatatgacag

SEQ ID NO: 890 - RNA, 20 nt, synthetic construct
  source 1..20: mol_type = other RNA
tatgatgttttggtcaatga

SEQ ID NO: 891 - RNA, 20 nt, synthetic construct
  source 1..20: mol_type = other RNA
aaaatgctgatatgatgttt

SEQ ID NO: 892 - RNA, 20 nt, synthetic construct
  source 1..20: mol_type = other RNA
cattttttcttctaagattt

SEQ ID NO: 893 - RNA, 20 nt, synthetic construct
  source 1..20: mol_type = other RNA
attttttcttctaagatttt

SEQ ID NO: 894 - RNA, 20 nt, synthetic construct
  source 1..20: mol_type = other RNA
taagattttgggagcaccaa

SEQ ID NO: 895 - RNA, 20 nt, synthetic construct
  source 1..20: mol_type = other RNA
aagattttgggagcaccaaa

SEQ ID NO: 896 - RNA, 20 nt, synthetic construct
  source 1..20: mol_type = other RNA
atcctgttagtgtatccctt

SEQ ID NO: 897 - RNA, 20 nt, synthetic construct
  source 1..20: mol_type = other RNA
caccaaagggatacactaac

SEQ ID NO: 898 - RNA, 20 nt, synthetic construct
  source 1..20: mol_type = other RNA
acaggatatactctttataa

SEQ ID NO: 899 - RNA, 20 nt, synthetic construct
  source 1..20: mol_type = other RNA
caggatatactctttataat

SEQ ID NO: 900 - RNA, 20 nt, synthetic construct
  source 1..20: mol_type = other RNA
tatactctttataatgggtt

SEQ ID NO: 901 - RNA, 20 nt, synthetic construct
  source 1..20: mol_type = other RNA
tgcagctacttcttttaaaa

SEQ ID NO: 902 - RNA, 20 nt, synthetic construct
  source 1..20: mol_type = other RNA
cagtagaaattagacaagtt

SEQ ID NO: 903 - RNA, 20 nt, synthetic construct
  source 1..20: mol_type = other RNA
agcaatgaatttattttatt

SEQ ID NO: 904 - RNA, 20 nt, synthetic construct
  source 1..20: mol_type = other RNA
aacctgaaaagaaaagaaaa

SEQ ID NO: 905 - RNA, 20 nt, synthetic construct
  source 1..20: mol_type = other RNA
aacctttttcttttcttttc

SEQ ID NO: 906 - RNA, 20 nt, synthetic construct
  source 1..20: mol_type = other RNA
aggtttgaagatgccgcatt

SEQ ID NO: 907 - RNA, 20 nt, synthetic construct
  source 1..20: mol_type = other RNA
gaattcatccaatccaaatg

SEQ ID NO: 908 - RNA, 20 nt, synthetic construct
  source 1..20: mol_type = other RNA
tgaagatgccgcatttggat

SEQ ID NO: 909 - RNA, 20 nt, synthetic construct
  source 1..20: mol_type = other RNA
aaaagcaagcaagcagaatt

SEQ ID NO: 910 - RNA, 20 nt, synthetic construct
  source 1..20: mol_type = other RNA
acactttatgcacaaaatgt

SEQ ID NO: 911 - RNA, 20 nt, synthetic construct
  source 1..20: mol_type = other RNA
cactttatgcacaaaatgta

SEQ ID NO: 912 - RNA, 20 nt, synthetic construct
  source 1..20: mol_type = other RNA
gggttataataatgttaaca

SEQ ID NO: 913 - RNA, 20 nt, synthetic construct
  source 1..20: mol_type = other RNA
ctgctcagatacatcaaaca

SEQ ID NO: 914 - RNA, 20 nt, synthetic construct
  source 1..20: mol_type = other RNA
catgtttgatgtatctgagc

SEQ ID NO: 915 - RNA, 20 nt, synthetic construct
  source 1..20: mol_type = other RNA
atctgagcaggttgctccac

SEQ ID NO: 916 - RNA, 20 nt, synthetic construct
  source 1..20: mol_type = other RNA
agccctcctagagctacctg

SEQ ID NO: 917 - RNA, 20 nt, synthetic construct
  source 1..20: mol_type = other RNA
gttgctccacaggtagctct

SEQ ID NO: 918 - RNA, 20 nt, synthetic construct
  source 1..20: mol_type = other RNA
gctccacaggtagctctagg

SEQ ID NO: 919 - RNA, 20 nt, synthetic construct
  source 1..20: mol_type = other RNA
ctccacaggtagctctagga

SEQ ID NO: 920 - RNA, 20 nt, synthetic construct
  source 1..20: mol_type = other RNA
acaggtagctctaggagggc

SEQ ID NO: 921 - RNA, 20 nt, synthetic construct
  source 1..20: mol_type = other RNA
taggagggctggcaacttag

SEQ ID NO: 922 - RNA, 20 nt, synthetic construct
  source 1..20: mol_type = other RNA
gagggctggcaacttagagg

SEQ ID NO: 923 - RNA, 20 nt, synthetic construct
  source 1..20: mol_type = other RNA
agggctggcaacttagaggt

SEQ ID NO: 924 - RNA, 20 nt, synthetic construct
  source 1..20: mol_type = other RNA
gggctggcaacttagaggtg

SEQ ID NO: 925 - RNA, 20 nt, synthetic construct
  source 1..20: mol_type = other RNA
tctgaccaagatgttgatgt

SEQ ID NO: 926 - RNA, 20 nt, synthetic construct
  source 1..20: mol_type = other RNA
cttatccaacatcaacatct

SEQ ID NO: 927 - RNA, 20 nt, synthetic construct
  source 1..20: mol_type = other RNA
tctaagcagagtatgtaaat

SEQ ID NO: 928 - RNA, 20 nt, synthetic construct
  source 1..20: mol_type = other RNA
tacatactctgcttagaatt

SEQ ID NO: 929 - RNA, 20 nt, synthetic construct
  source 1..20: mol_type = other RNA
acatactctgcttagaattt

SEQ ID NO: 930 - RNA, 20 nt, synthetic construct
  source 1..20: mol_type = other RNA
catactctgcttagaatttg

SEQ ID NO: 931 - RNA, 20 nt, synthetic construct
  source 1..20: mol_type = other RNA
atactctgcttagaatttgg

SEQ ID NO: 932 - RNA, 20 nt, synthetic construct
  source 1..20: mol_type = other RNA
aatttagaaatataattgac

SEQ ID NO: 933 - RNA, 20 nt, synthetic construct
  source 1..20: mol_type = other RNA
aatataattgacaggattat

SEQ ID NO: 934 - RNA, 20 nt, synthetic construct
  source 1..20: mol_type = other RNA
cttatacatttgataaagta

SEQ ID NO: 935 - RNA, 20 nt, synthetic construct
  source 1..20: mol_type = other RNA
acatttgataaagtaaggca

SEQ ID NO: 936 - RNA, 20 nt, synthetic construct
  source 1..20: mol_type = other RNA
gataaagtaaggcatggttg

SEQ ID NO: 937 - RNA, 20 nt, synthetic construct
  source 1..20: mol_type = other RNA
aggcatggttgtggttaatc

SEQ ID NO: 938 - RNA, 20 nt, synthetic construct
  source 1..20: mol_type = other RNA
tttatgatttatttaacttg

SEQ ID NO: 939 - RNA, 20 nt, synthetic construct
  source 1..20: mol_type = other RNA
gaaaataaaggggtaatagt

SEQ ID NO: 940 - RNA, 20 nt, synthetic construct
  source 1..20: mol_type = other RNA
tgaaaataaaggggtaatag

SEQ ID NO: 941 - RNA, 20 nt, synthetic construct
  source 1..20: mol_type = other RNA
ttccctgtttgaaaataaag

SEQ ID NO: 942 - RNA, 20 nt, synthetic construct
  source 1..20: mol_type = other RNA
tttccctgtttgaaaataaa

SEQ ID NO: 943 - RNA, 20 nt, synthetic construct
  source 1..20: mol_type = other RNA
gtttccctgtttgaaaataa

SEQ ID NO: 944 - RNA, 20 nt, synthetic construct
  source 1..20: mol_type = other RNA
ttacccctttattttcaaac

SEQ ID NO: 945 - RNA, 20 nt, synthetic construct
  source 1..20: mol_type = other RNA
tacccctttattttcaaaca

SEQ ID NO: 946 - RNA, 20 nt, synthetic construct
  source 1..20: mol_type = other RNA
aacagtcttcaagttccact

SEQ ID NO: 947 - RNA, 20 nt, synthetic construct
  source 1..20: mol_type = other RNA
ggttcacattttttaccaag

SEQ ID NO: 948 - RNA, 20 nt, synthetic construct
  source 1..20: mol_type = other RNA
agccaaactctatatacaag

SEQ ID NO: 949 - RNA, 20 nt, synthetic construct
  source 1..20: mol_type = other RNA
gagccaaactctatatacaa

SEQ ID NO: 950 - RNA, 20 nt, synthetic construct
  source 1..20: mol_type = other RNA
tgagccaaactctatataca

SEQ ID NO: 951 - RNA, 20 nt, synthetic construct
  source 1..20: mol_type = other RNA
aaccccttgtatatagagtt

SEQ ID NO: 952 - RNA, 20 nt, synthetic construct
  source 1..20: mol_type = other RNA
gagtttggctcacagtgtaa

SEQ ID NO: 953 - RNA, 20 nt, synthetic construct
  source 1..20: mol_type = other RNA
agtttggctcacagtgtaaa

SEQ ID NO: 954 - RNA, 20 nt, synthetic construct
  source 1..20: mol_type = other RNA
ctggaaaatgtgaatcactg

SEQ ID NO: 955 - RNA, 20 nt, synthetic construct
  source 1..20: mol_type = other RNA
tgattcacattttccagatt

SEQ ID NO: 956 - RNA, 20 nt, synthetic construct
  source 1..20: mol_type = other RNA
tgagcatcagattcctaatc

SEQ ID NO: 957 - RNA, 20 nt, synthetic construct
  source 1..20: mol_type = other RNA
tgatgctcaaagaagttaaa

SEQ ID NO: 958 - RNA, 20 nt, synthetic construct
  source 1..20: mol_type = other RNA
aagaagttaaatggcatagt

SEQ ID NO: 959 - RNA, 20 nt, synthetic construct
  source 1..20: mol_type = other RNA
agaagttaaatggcatagtt

SEQ ID NO: 960 - RNA, 20 nt, synthetic construct
  source 1..20: mol_type = other RNA
gaagttaaatggcatagttg

SEQ ID NO: 961 - RNA, 20 nt, synthetic construct
  source 1..20: mol_type = other RNA
ggggtgacacagctgtctag

SEQ ID NO: 962 - RNA, 20 nt, synthetic construct
  source 1..20: mol_type = other RNA
gggtgacacagctgtctagt

SEQ ID NO: 963 - RNA, 20 nt, synthetic construct
  source 1..20: mol_type = other RNA
tgacacagctgtctagtggg

SEQ ID NO: 964 - RNA, 20 nt, synthetic construct
  source 1..20: mol_type = other RNA
ctggctaaaatatagaaggc

SEQ ID NO: 965 - RNA, 20 nt, synthetic construct
  source 1..20: mol_type = other RNA
aacgctggctaaaatataga

SEQ ID NO: 966 - RNA, 20 nt, synthetic construct
  source 1..20: mol_type = other RNA
tggcccgcaggaaagaacgc

SEQ ID NO: 967 - RNA, 20 nt, synthetic construct
  source 1..20: mol_type = other RNA
ttagccagcgttctttcctg

SEQ ID NO: 968 - RNA, 20 nt, synthetic construct
  source 1..20: mol_type = other RNA
tagccagcgttctttcctgc

SEQ ID NO: 969 - RNA, 20 nt, synthetic construct
  source 1..20: mol_type = other RNA
ctcctcatgacctggcccgc

SEQ ID NO: 970 - RNA, 20 nt, synthetic construct
  source 1..20: mol_type = other RNA
agcgttctttcctgcgggcc

SEQ ID NO: 971 - RNA, 20 nt, synthetic construct
  source 1..20: mol_type = other RNA
tctgcatactcctcatgacc

SEQ ID NO: 972 - RNA, 20 nt, synthetic construct
  source 1..20: mol_type = other RNA
ttcctgcgggccaggtcatg

SEQ ID NO: 973 - RNA, 20 nt, synthetic construct
  source 1..20: mol_type = other RNA
aggagtatgcagactctaag

SEQ ID NO: 974 - RNA, 20 nt, synthetic construct
  source 1..20: mol_type = other RNA
ggagtatgcagactctaaga

SEQ ID NO: 975 - RNA, 20 nt, synthetic construct
  source 1..20: mol_type = other RNA
gagggagcaaaagtatctga

SEQ ID NO: 976 - RNA, 20 nt, synthetic construct
  source 1..20: mol_type = other RNA
aaggatttaatattttagca

SEQ ID NO: 977 - RNA, 20 nt, synthetic construct
  source 1..20: mol_type = other RNA
atagatatacaatcatccct

SEQ ID NO: 978 - RNA, 20 nt, synthetic construct
  source 1..20: mol_type = other RNA
caatcccccagggagaccaa

SEQ ID NO: 979 - RNA, 20 nt, synthetic construct
  source 1..20: mol_type = other RNA
ccaatcccccagggagacca

SEQ ID NO: 980 - RNA, 20 nt, synthetic construct
  source 1..20: mol_type = other RNA
caatcatcccttggtctccc

SEQ ID NO: 981 - RNA, 20 nt, synthetic construct
  source 1..20: mol_type = other RNA
aatcatcccttggtctccct

SEQ ID NO: 982 - RNA, 20 nt, synthetic construct
  source 1..20: mol_type = other RNA
atcatcccttggtctccctg

SEQ ID NO: 983 - RNA, 20 nt, synthetic construct
  source 1..20: mol_type = other RNA
tcatcccttggtctccctgg

SEQ ID NO: 984 - RNA, 20 nt, synthetic construct
  source 1..20: mol_type = other RNA
gtcctgaaaccaatccccca

SEQ ID NO: 985 - RNA, 20 nt, synthetic construct
  source 1..20: mol_type = other RNA
ggtcctgaaaccaatccccc

SEQ ID NO: 986 - RNA, 20 nt, synthetic construct
  source 1..20: mol_type = other RNA
ccttggtctccctgggggat

SEQ ID NO: 987 - RNA, 20 nt, synthetic construct
  source 1..20: mol_type = other RNA
ctccctgggggattggtttc

SEQ ID NO: 988 - RNA, 20 nt, synthetic construct
  source 1..20: mol_type = other RNA
ttggtttcaggaccccttct

SEQ ID NO: 989 - RNA, 20 nt, synthetic construct
  source 1..20: mol_type = other RNA
tagatttggtgtccaagaag

SEQ ID NO: 990 - RNA, 20 nt, synthetic construct
  source 1..20: mol_type = other RNA
atagatttggtgtccaagaa

SEQ ID NO: 991 - RNA, 20 nt, synthetic construct
  source 1..20: mol_type = other RNA
catagatttggtgtccaaga

SEQ ID NO: 992 - RNA, 20 nt, synthetic construct
  source 1..20: mol_type = other RNA
cttcttggacaccaaatcta

SEQ ID NO: 993 - RNA, 20 nt, synthetic construct
  source 1..20: mol_type = other RNA
gacttaaatatccatagatt

SEQ ID NO: 994 - RNA, 20 nt, synthetic construct
  source 1..20: mol_type = other RNA
tactataccattttatagaa

SEQ ID NO: 995 - RNA, 20 nt, synthetic construct
  source 1..20: mol_type = other RNA
atactataccattttataga

SEQ ID NO: 996 - RNA, 20 nt, synthetic construct
  source 1..20: mol_type = other RNA
tttaagtcccttctataaaa

SEQ ID NO: 997 - RNA, 20 nt, synthetic construct
  source 1..20: mol_type = other RNA
gtatacaggaggatgtggat

SEQ ID NO: 998 - RNA, 20 nt, synthetic construct
  source 1..20: mol_type = other RNA
ttaaagtatacaggaggatg

SEQ ID NO: 999 - RNA, 20 nt, synthetic construct
  source 1..20: mol_type = other RNA
aatgatttaaagtatacagg

SEQ ID NO: 1000 - RNA, 20 nt, synthetic construct
  source 1..20: mol_type = other RNA
agaaatgatttaaagtatac

SEQ ID NO: 1001 - RNA, 20 nt, synthetic construct
  source 1..20: mol_type = other RNA
catagcatttacattgtatt

SEQ ID NO: 1002 - RNA, 20 nt, synthetic construct
  source 1..20: mol_type = other RNA
caaatagttgttattgttta

SEQ ID NO: 1003 - RNA, 20 nt, synthetic construct
  source 1..20: mol_type = other RNA
acactggggaaaaaaaggga

SEQ ID NO: 1004 - RNA, 20 nt, synthetic construct
  source 1..20: mol_type = other RNA
aaaaacactggggaaaaaaa

SEQ ID NO: 1005 - RNA, 20 nt, synthetic construct
  source 1..20: mol_type = other RNA
caaaaacactggggaaaaaa

SEQ ID NO: 1006 - RNA, 20 nt, synthetic construct
  source 1..20: mol_type = other RNA
accatggatcaaaaacactg

SEQ ID NO: 1007 - RNA, 20 nt, synthetic construct
  source 1..20: mol_type = other RNA
aaccatggatcaaaaacact

SEQ ID NO: 1008 - RNA, 20 nt, synthetic construct
  source 1..20: mol_type = other RNA
aaaccatggatcaaaaacac

SEQ ID NO: 1009 - RNA, 20 nt, synthetic construct
  source 1..20: mol_type = other RNA
tccccagtgtttttgatcca

SEQ ID NO: 1010 - RNA, 20 nt, synthetic construct
  source 1..20: mol_type = other RNA
tctgtggattcagcaaacca

SEQ ID NO: 1011 - RNA, 20 nt, synthetic construct
  source 1..20: mol_type = other RNA
gtttgctgaatccacagatg

SEQ ID NO: 1012 - RNA, 20 nt, synthetic construct
  source 1..20: mol_type = other RNA
atccaggggctccacatctg

SEQ ID NO: 1013 - RNA, 20 nt, synthetic construct
  source 1..20: mol_type = other RNA
atccacagatgtggagcccc

SEQ ID NO: 1014 - RNA, 20 nt, synthetic construct
  source 1..20: mol_type = other RNA
agcgggccttccgtatccag

SEQ ID NO: 1015 - RNA, 20 nt, synthetic construct
  source 1..20: mol_type = other RNA
agatgtggagcccctggata

SEQ ID NO: 1016 - RNA, 20 nt, synthetic construct
  source 1..20: mol_type = other RNA
cagcgggccttccgtatcca

SEQ ID NO: 1017 - RNA, 20 nt, synthetic construct
  source 1..20: mol_type = other RNA
acagcgggccttccgtatcc

SEQ ID NO: 1018 - RNA, 20 nt, synthetic construct
  source 1..20: mol_type = other RNA
gtggagcccctggatacgga

SEQ ID NO: 1019 - RNA, 20 nt, synthetic construct
  source 1..20: mol_type = other RNA
tttgtcattcaaagtacagc

SEQ ID NO: 1020 - RNA, 20 nt, synthetic construct
  source 1..20: mol_type = other RNA
atttgtcattcaaagtacag

SEQ ID NO: 1021 - RNA, 20 nt, synthetic construct
  source 1..20: mol_type = other RNA
gctgggtgagcggagattcc

SEQ ID NO: 1022 - RNA, 20 nt, synthetic construct
  source 1..20: mol_type = other RNA
tgagcggagattccaggcac

SEQ ID NO: 1023 - RNA, 20 nt, synthetic construct
  source 1..20: mol_type = other RNA
cagctgccctggccagtgcc

SEQ ID NO: 1024 - RNA, 20 nt, synthetic construct
  source 1..20: mol_type = other RNA
ggagattccaggcactggcc

SEQ ID NO: 1025 - RNA, 20 nt, synthetic construct
  source 1..20: mol_type = other RNA
gagattccaggcactggcca

SEQ ID NO: 1026 - RNA, 20 nt, synthetic construct
  source 1..20: mol_type = other RNA
tggagtcagggcagctgccc

SEQ ID NO: 1027 - RNA, 20 nt, synthetic construct
  source 1..20: mol_type = other RNA
catggcagcccttggagtca

SEQ ID NO: 1028 - RNA, 20 nt, synthetic construct
  source 1..20: mol_type = other RNA
tcatggcagcccttggagtc

SEQ ID NO: 1029 - RNA, 20 nt, synthetic construct
  source 1..20: mol_type = other RNA
gggcagctgccctgactcca

SEQ ID NO: 1030 - RNA, 20 nt, synthetic construct
  source 1..20: mol_type = other RNA
ggcagctgccctgactccaa

SEQ ID NO: 1031 - RNA, 20 nt, synthetic construct
  source 1..20: mol_type = other RNA
aagttgttcatggcagccct

SEQ ID NO: 1032 - RNA, 20 nt, synthetic construct
  source 1..20: mol_type = other RNA
gatggcctggaagttgttca

SEQ ID NO: 1033 - RNA, 20 nt, synthetic construct
  source 1..20: mol_type = other RNA
ggctgccatgaacaacttcc

SEQ ID NO: 1034 - RNA, 20 nt, synthetic construct
  source 1..20: mol_type = other RNA
tcacctgagtcaggatggcc

SEQ ID NO: 1035 - RNA, 20 nt, synthetic construct
  source 1..20: mol_type = other RNA
cattctcacctgagtcagga

SEQ ID NO: 1036 - RNA, 20 nt, synthetic construct
  source 1..20: mol_type = other RNA
cttccaggccatcctgactc

SEQ ID NO: 1037 - RNA, 20 nt, synthetic construct
  source 1..20: mol_type = other RNA
gcagcattctcacctgagtc

SEQ ID NO: 1038 - RNA, 20 nt, synthetic construct
  source 1..20: mol_type = other RNA
caccaggctgggctgatggc

SEQ ID NO: 1039 - RNA, 20 nt, synthetic construct
  source 1..20: mol_type = other RNA
cctgcaccaggctgggctga

SEQ ID NO: 1040 - RNA, 20 nt, synthetic construct
  source 1..20: mol_type = other RNA
ctccagccatcagcccagcc

SEQ ID NO: 1041 - RNA, 20 nt, synthetic construct
  source 1..20: mol_type = other RNA
aagagggcctgcaccaggct

SEQ ID NO: 1042 - RNA, 20 nt, synthetic construct
  source 1..20: mol_type = other RNA
caagagggcctgcaccaggc

SEQ ID NO: 1043 - RNA, 20 nt, synthetic construct
  source 1..20: mol_type = other RNA
ccatcagcccagcctggtgc

SEQ ID NO: 1044 - RNA, 20 nt, synthetic construct
  source 1..20: mol_type = other RNA
tgtccaagagggcctgcacc

SEQ ID NO: 1045 - RNA, 20 nt, synthetic construct
  source 1..20: mol_type = other RNA
cagcctggtgcaggccctct

SEQ ID NO: 1046 - RNA, 20 nt, synthetic construct
  source 1..20: mol_type = other RNA
cttcagcaggttgtccaaga

SEQ ID NO: 1047 - RNA, 20 nt, synthetic construct
  source 1..20: mol_type = other RNA
ccttcagcaggttgtccaag

SEQ ID NO: 1048 - RNA, 20 nt, synthetic construct
  source 1..20: mol_type = other RNA
cctcttggacaacctgctga

SEQ ID NO: 1049 - RNA, 20 nt, synthetic construct
  source 1..20: mol_type = other RNA
agaggaggtcctccttcagc

SEQ ID NO: 1050 - RNA, 20 nt, synthetic construct
  source 1..20: mol_type = other RNA
cttggacaacctgctgaagg

SEQ ID NO: 1051 - RNA, 20 nt, synthetic construct
  source 1..20: mol_type = other RNA
agtggtattccctggagagg

SEQ ID NO: 1052 - RNA, 20 nt, synthetic construct
  source 1..20: mol_type = other RNA
tgaaggaggacctcctctcc

SEQ ID NO: 1053 - RNA, 20 nt, synthetic construct
  source 1..20: mol_type = other RNA
gaaggaggacctcctctcca

SEQ ID NO: 1054 - RNA, 20 nt, synthetic construct
  source 1..20: mol_type = other RNA
tgcagtggtattccctggag

SEQ ID NO: 1055 - RNA, 20 nt, synthetic construct
  source 1..20: mol_type = other RNA
cagagtgcagtggtattccc

SEQ ID NO: 1056 - RNA, 20 nt, synthetic construct
  source 1..20: mol_type = other RNA
gctcatggagcagagtgcag

SEQ ID NO: 1057 - RNA, 20 nt, synthetic construct
  source 1..20: mol_type = other RNA
gagcctcactatcaggctca

SEQ ID NO: 1058 - RNA, 20 nt, synthetic construct
  source 1..20: mol_type = other RNA
ctggccagagcctcactatc

SEQ ID NO: 1059 - RNA, 20 nt, synthetic construct
  source 1..20: mol_type = other RNA
gctccatgagcctgatagtg

SEQ ID NO: 1060 - RNA, 20 nt, synthetic construct
  source 1..20: mol_type = other RNA
tgagcctgatagtgaggctc

SEQ ID NO: 1061 - RNA, 20 nt, synthetic construct
  source 1..20: mol_type = other RNA
ctgatagtgaggctctggcc

SEQ ID NO: 1062 - RNA, 20 nt, synthetic construct
  source 1..20: mol_type = other RNA
tagggtcaaagagatcttcc

SEQ ID NO: 1063 - RNA, 20 nt, synthetic construct
  source 1..20: mol_type = other RNA
caggtctcctttctctagta

SEQ ID NO: 1064 - RNA, 20 nt, synthetic construct
  source 1..20: mol_type = other RNA
ccaggtctcctttctctagt

SEQ ID NO: 1065 - RNA, 20 nt, synthetic construct
  source 1..20: mol_type = other RNA
tctttgaccctactagagaa

SEQ ID NO: 1066 - RNA, 20 nt, synthetic construct
  source 1..20: mol_type = other RNA
cctactagagaaaggagacc

SEQ ID NO: 1067 - RNA, 20 nt, synthetic construct
  source 1..20: mol_type = other RNA
agagaaaggagacctggatt

SEQ ID NO: 1068 - RNA, 20 nt, synthetic construct
  source 1..20: mol_type = other RNA
accccaggagggccaaatcc

SEQ ID NO: 1069 - RNA, 20 nt, synthetic construct
  source 1..20: mol_type = other RNA
agacctggatttggccctcc

SEQ ID NO: 1070 - RNA, 20 nt, synthetic construct
  source 1..20: mol_type = other RNA
gacctggatttggccctcct

SEQ ID NO: 1071 - RNA, 20 nt, synthetic construct
  source 1..20: mol_type = other RNA
acctggatttggccctcctg

SEQ ID NO: 1072 - RNA, 20 nt, synthetic construct
  source 1..20: mol_type = other RNA
actccgggcccaccccagga

SEQ ID NO: 1073 - RNA, 20 nt, synthetic construct
  source 1..20: mol_type = other RNA
cactccgggcccaccccagg

SEQ ID NO: 1074 - RNA, 20 nt, synthetic construct
  source 1..20: mol_type = other RNA
tggatttggccctcctgggg

SEQ ID NO: 1075 - RNA, 20 nt, synthetic construct
  source 1..20: mol_type = other RNA
ggatttggccctcctggggt

SEQ ID NO: 1076 - RNA, 20 nt, synthetic construct
  source 1..20: mol_type = other RNA
gcccactccgggcccacccc

SEQ ID NO: 1077 - RNA, 20 nt, synthetic construct
  source 1..20: mol_type = other RNA
tggccctcctggggtgggcc

SEQ ID NO: 1078 - RNA, 20 nt, synthetic construct
  source 1..20: mol_type = other RNA
ctcctggggtgggcccggag

SEQ ID NO: 1079 - RNA, 20 nt, synthetic construct
  source 1..20: mol_type = other RNA
tcctggggtgggcccggagt

SEQ ID NO: 1080 - RNA, 20 nt, synthetic construct
  source 1..20: mol_type = other RNA
tgggggctgcagcccactcc

SEQ ID NO: 1081 - RNA, 20 nt, synthetic construct
  source 1..20: mol_type = other RNA
ctgggggctgcagcccactc

SEQ ID NO: 1082 - RNA, 20 nt, synthetic construct
  source 1..20: mol_type = other RNA
gggcccctctcggctgctgg

SEQ ID NO: 1083 - RNA, 20 nt, synthetic construct
  source 1..20: mol_type = other RNA
ggggcccctctcggctgctg

SEQ ID NO: 1084 - RNA, 20 nt, synthetic construct
  source 1..20: mol_type = other RNA
cggggcccctctcggctgct

SEQ ID NO: 1085 - RNA, 20 nt, synthetic construct
  source 1..20: mol_type = other RNA
ccggggcccctctcggctgc

SEQ ID NO: 1086 - RNA, 20 nt, synthetic construct
  source 1..20: mol_type = other RNA
tgcagcccccagcagccgag

SEQ ID NO: 1087 - RNA, 20 nt, synthetic construct
  source 1..20: mol_type = other RNA
gcagcccccagcagccgaga

SEQ ID NO: 1088 - RNA, 20 nt, synthetic construct
  source 1..20: mol_type = other RNA
cagcccccagcagccgagag

SEQ ID NO: 1089 - RNA, 20 nt, synthetic construct
  source 1..20: mol_type = other RNA
actgtggccggggcccctct

SEQ ID NO: 1090 - RNA, 20 nt, synthetic construct
  source 1..20: mol_type = other RNA
ccagcagccgagaggggccc

SEQ ID NO: 1091 - RNA, 20 nt, synthetic construct
  source 1..20: mol_type = other RNA
caccatggtcactgtggccg

SEQ ID NO: 1092 - RNA, 20 nt, synthetic construct
  source 1..20: mol_type = other RNA
ccaccatggtcactgtggcc

SEQ ID NO: 1093 - RNA, 20 nt, synthetic construct
  source 1..20: mol_type = other RNA
accaccatggtcactgtggc

SEQ ID NO: 1094 - RNA, 20 nt, synthetic construct
  source 1..20: mol_type = other RNA
acttaccaccatggtcactg

SEQ ID NO: 1095 - RNA, 20 nt, synthetic construct
  source 1..20: mol_type = other RNA
ggccccggccacagtgacca

SEQ ID NO: 1096 - RNA, 20 nt, synthetic construct
  source 1..20: mol_type = other RNA
cccggccacagtgaccatgg

SEQ ID NO: 1097 - RNA, 20 nt, synthetic construct
  source 1..20: mol_type = other RNA
gtgatgccaacttaccacca

SEQ ID NO: 1098 - RNA, 20 nt, synthetic construct
  source 1..20: mol_type = other RNA
cagtgaccatggtggtaagt

SEQ ID NO: 1099 - RNA, 20 nt, synthetic construct
  source 1..20: mol_type = other RNA
gttggcatcacttttaatca

SEQ ID NO: 1100 - RNA, 20 nt, synthetic construct
  source 1..20: mol_type = other RNA
gacagactgtagacagctca

SEQ ID NO: 1101 - RNA, 20 nt, synthetic construct
  source 1..20: mol_type = other RNA
gacttccctttcagagagga

SEQ ID NO: 1102 - RNA, 20 nt, synthetic construct
  source 1..20: mol_type = other RNA
tgacttccctttcagagagg

SEQ ID NO: 1103 - RNA, 20 nt, synthetic construct
  source 1..20: mol_type = other RNA
cattgacttccctttcagag

SEQ ID NO: 1104 - RNA, 20 nt, synthetic construct
  source 1..20: mol_type = other RNA
gattttccctcctctctgaa

SEQ ID NO: 1105 - RNA, 20 nt, synthetic construct
  source 1..20: mol_type = other RNA
attttccctcctctctgaaa

SEQ ID NO: 1106 - RNA, 20 nt, synthetic construct
  source 1..20: mol_type = other RNA
ctctctgaaagggaagtcaa

SEQ ID NO: 1107 - RNA, 20 nt, synthetic construct
  source 1..20: mol_type = other RNA
tctctgaaagggaagtcaat

SEQ ID NO: 1108 - RNA, 20 nt, synthetic construct
  source 1..20: mol_type = other RNA
tgaaagggaagtcaatggga

SEQ ID NO: 1109 - RNA, 20 nt, synthetic construct
  source 1..20: mol_type = other RNA
aagtcaatgggaaggcagac

SEQ ID NO: 1110 - RNA, 20 nt, synthetic construct
  source 1..20: mol_type = other RNA
ctgccagctcactagacact

SEQ ID NO: 1111 - RNA, 20 nt, synthetic construct
  source 1..20: mol_type = other RNA
aatccaagtgtctagtgagc

SEQ ID NO: 1112 - RNA, 20 nt, synthetic construct
  source 1..20: mol_type = other RNA
caagtgtctagtgagctggc

SEQ ID NO: 1113 - RNA, 20 nt, synthetic construct
  source 1..20: mol_type = other RNA
tggcaggagcagtgaaaact

SEQ ID NO: 1114 - RNA, 20 nt, synthetic construct
  source 1..20: mol_type = other RNA
tggagcactgtctctgttgc

SEQ ID NO: 1115 - RNA, 20 nt, synthetic construct
  source 1..20: mol_type = other RNA
ggagcactgtctctgttgct

SEQ ID NO: 1116 - RNA, 20 nt, synthetic construct
  source 1..20: mol_type = other RNA
gtctctgttgctgggtgtgc

SEQ ID NO: 1117 - RNA, 20 nt, synthetic construct
  source 1..20: mol_type = other RNA
gctgggtgtgctggagcgaa

SEQ ID NO: 1118 - RNA, 20 nt, synthetic construct
  source 1..20: mol_type = other RNA
atggttccttccagcagagt

SEQ ID NO: 1119 - RNA, 20 nt, synthetic construct
  source 1..20: mol_type = other RNA
cggcgtgcttcccactctgc

SEQ ID NO: 1120 - RNA, 20 nt, synthetic construct
  source 1..20: mol_type = other RNA
gatggttccttccagcagag

SEQ ID NO: 1121 - RNA, 20 nt, synthetic construct
  source 1..20: mol_type = other RNA
gtgcttcccactctgctgga

SEQ ID NO: 1122 - RNA, 20 nt, synthetic construct
  source 1..20: mol_type = other RNA
ctgctggaaggaaccatccc

SEQ ID NO: 1123 - RNA, 20 nt, synthetic construct
  source 1..20: mol_type = other RNA
tgctggaaggaaccatccca

SEQ ID NO: 1124 - RNA, 20 nt, synthetic construct
  source 1..20: mol_type = other RNA
gctggaaggaaccatcccag

SEQ ID NO: 1125 - RNA, 20 nt, synthetic construct
  source 1..20: mol_type = other RNA
ttggctgcgtgcccctggga

SEQ ID NO: 1126 - RNA, 20 nt, synthetic construct
  source 1..20: mol_type = other RNA
gcatttggctgcgtgcccct

SEQ ID NO: 1127 - RNA, 20 nt, synthetic construct
  source 1..20: mol_type = other RNA
ggcatttggctgcgtgcccc

SEQ ID NO: 1128 - RNA, 20 nt, synthetic construct
  source 1..20: mol_type = other RNA
agtgaacccaagcaggcatt

SEQ ID NO: 1129 - RNA, 20 nt, synthetic construct
  source 1..20: mol_type = other RNA
cacgcagccaaatgcctgct

SEQ ID NO: 1130 - RNA, 20 nt, synthetic construct
  source 1..20: mol_type = other RNA
acgcagccaaatgcctgctt

SEQ ID NO: 1131 - RNA, 20 nt, synthetic construct
  source 1..20: mol_type = other RNA
ctcagggagtgaacccaagc

SEQ ID NO: 1132 - RNA, 20 nt, synthetic construct
  source 1..20: mol_type = other RNA
tggtgtatcgtcagggctca

SEQ ID NO: 1133 - RNA, 20 nt, synthetic construct
  source 1..20: mol_type = other RNA
ttggtgtatcgtcagggctc

SEQ ID NO: 1134 - RNA, 20 nt, synthetic construct
  source 1..20: mol_type = other RNA
ttaatgttggtgtatcgtca

SEQ ID NO: 1135 - RNA, 20 nt, synthetic construct
  source 1..20: mol_type = other RNA
gttaatgttggtgtatcgtc

SEQ ID NO: 1136 - RNA, 20 nt, synthetic construct
  source 1..20: mol_type = other RNA
catccatgccccgttaatgt

SEQ ID NO: 1137 - RNA, 20 nt, synthetic construct
  source 1..20: mol_type = other RNA
tgacgatacaccaacattaa

SEQ ID NO: 1138 - RNA, 20 nt, synthetic construct
  source 1..20: mol_type = other RNA
gacgatacaccaacattaac

SEQ ID NO: 1139 - RNA, 20 nt, synthetic construct
  source 1..20: mol_type = other RNA
acgatacaccaacattaacg

SEQ ID NO: 1140 - RNA, 20 nt, synthetic construct
  source 1..20: mol_type = other RNA
acaccaacattaacggggca

SEQ ID NO: 1141 - RNA, 20 nt, synthetic construct
  source 1..20: mol_type = other RNA
caacattaacggggcatgga

SEQ ID NO: 1142 - RNA, 20 nt, synthetic construct
  source 1..20: mol_type = other RNA
cagcagacccctttgaaggc

SEQ ID NO: 1143 - RNA, 20 nt, synthetic construct
  source 1..20: mol_type = other RNA
agatcagctcctgccttcaa

SEQ ID NO: 1144 - RNA, 20 nt, synthetic construct
  source 1..20: mol_type = other RNA
gatcagctcctgccttcaaa

SEQ ID NO: 1145 - RNA, 20 nt, synthetic construct
  source 1..20: mol_type = other RNA
atcagctcctgccttcaaag

SEQ ID NO: 1146 - RNA, 20 nt, synthetic construct
  source 1..20: mol_type = other RNA
tagacagcagacccctttga

SEQ ID NO: 1147 - RNA, 20 nt, synthetic construct
  source 1..20: mol_type = other RNA
caaaggggtctgctgtctag

SEQ ID NO: 1148 - RNA, 20 nt, synthetic construct
  source 1..20: mol_type = other RNA
aaaggggtctgctgtctagt

SEQ ID NO: 1149 - RNA, 20 nt, synthetic construct
  source 1..20: mol_type = other RNA
aaggggtctgctgtctagtg

SEQ ID NO: 1150 - RNA, 20 nt, synthetic construct
  source 1..20: mol_type = other RNA
ctgctgtctagtggggaaga

SEQ ID NO: 1151 - RNA, 20 nt, synthetic construct
  source 1..20: mol_type = other RNA
ctagtggggaagatggatgc

SEQ ID NO: 1152 - RNA, 20 nt, synthetic construct
  source 1..20: mol_type = other RNA
gtgagtcaaaatgagagaaa

SEQ ID NO: 1153 - RNA, 20 nt, synthetic construct
  source 1..20: mol_type = other RNA
tgagtcaaaatgagagaaat

SEQ ID NO: 1154 - RNA, 20 nt, synthetic construct
  source 1..20: mol_type = other RNA
gagtcaaaatgagagaaatg

SEQ ID NO: 1155 - RNA, 20 nt, synthetic construct
  source 1..20: mol_type = other RNA
caaaatgagagaaatggggc

SEQ ID NO: 1156 - RNA, 20 nt, synthetic construct
  source 1..20: mol_type = other RNA
aaaatgagagaaatggggcc

SEQ ID NO: 1157 - RNA, 20 nt, synthetic construct
  source 1..20: mol_type = other RNA
caggcgtgagccagtgcacc

SEQ ID NO: 1158 - RNA, 20 nt, synthetic construct
  source 1..20: mol_type = other RNA
agaaatggggccgggtgcac

SEQ ID NO: 1159 - RNA, 20 nt, synthetic construct
  source 1..20: mol_type = other RNA
tcccaaaatgctgggattac

SEQ ID NO: 1160 - RNA, 20 nt, synthetic construct
  source 1..20: mol_type = other RNA
ccttggcctcccaaaatgct

SEQ ID NO: 1161 - RNA, 20 nt, synthetic construct
  source 1..20: mol_type = other RNA
cgcctgtaatcccagcattt

SEQ ID NO: 1162 - RNA, 20 nt, synthetic construct
  source 1..20: mol_type = other RNA
gccttggcctcccaaaatgc

SEQ ID NO: 1163 - RNA, 20 nt, synthetic construct
  source 1..20: mol_type = other RNA
gcctgtaatcccagcatttt

SEQ ID NO: 1164 - RNA, 20 nt, synthetic construct
  source 1..20: mol_type = other RNA
tgtaatcccagcattttggg

SEQ ID NO: 1165 - RNA, 20 nt, synthetic construct
  source 1..20: mol_type = other RNA
cccagcattttgggaggcca

SEQ ID NO: 1166 - RNA, 20 nt, synthetic construct
  source 1..20: mol_type = other RNA
gcattttgggaggccaaggc

SEQ ID NO: 1167 - RNA, 20 nt, synthetic construct
  source 1..20: mol_type = other RNA
ctcaggtgatccacctgcct

SEQ ID NO: 1168 - RNA, 20 nt, synthetic construct
  source 1..20: mol_type = other RNA
ttttgggaggccaaggcagg

SEQ ID NO: 1169 - RNA, 20 nt, synthetic construct
  source 1..20: mol_type = other RNA
gctggtgtcgaactgatctc

SEQ ID NO: 1170 - RNA, 20 nt, synthetic construct
  source 1..20: mol_type = other RNA
agatcagttcgacaccagcc

SEQ ID NO: 1171 - RNA, 20 nt, synthetic construct
  source 1..20: mol_type = other RNA
ttttgccatgttggccaggc

SEQ ID NO: 1172 - RNA, 20 nt, synthetic construct
  source 1..20: mol_type = other RNA
agggttttgccatgttggcc

SEQ ID NO: 1173 - RNA, 20 nt, synthetic construct
  source 1..20: mol_type = other RNA
cgacaccagcctggccaaca

SEQ ID NO: 1174 - RNA, 20 nt, synthetic construct
  source 1..20: mol_type = other RNA
gagacagggttttgccatgt

SEQ ID NO: 1175 - RNA, 20 nt, synthetic construct
  source 1..20: mol_type = other RNA
tgtattttttagtagagaca

SEQ ID NO: 1176 - RNA, 20 nt, synthetic construct
  source 1..20: mol_type = other RNA
ttgtattttttagtagagac

SEQ ID NO: 1177 - RNA, 20 nt, synthetic construct
  source 1..20: mol_type = other RNA
caggcacccaccaggatgtc

SEQ ID NO: 1178 - RNA, 20 nt, synthetic construct
  source 1..20: mol_type = other RNA
caaaaaacagccagacatcc

SEQ ID NO: 1179 - RNA, 20 nt, synthetic construct
  source 1..20: mol_type = other RNA
aaaacagccagacatcctgg

SEQ ID NO: 1180 - RNA, 20 nt, synthetic construct
  source 1..20: mol_type = other RNA
aaacagccagacatcctggt

SEQ ID NO: 1181 - RNA, 20 nt, synthetic construct
  source 1..20: mol_type = other RNA
tgggactacaggcacccacc

SEQ ID NO: 1182 - RNA, 20 nt, synthetic construct
  source 1..20: mol_type = other RNA
tcctgagtagctgggactac

SEQ ID NO: 1183 - RNA, 20 nt, synthetic construct
  source 1..20: mol_type = other RNA
cctcagcctcctgagtagct

SEQ ID NO: 1184 - RNA, 20 nt, synthetic construct
  source 1..20: mol_type = other RNA
gcctcagcctcctgagtagc

SEQ ID NO: 1185 - RNA, 20 nt, synthetic construct
  source 1..20: mol_type = other RNA
gcctgtagtcccagctactc

SEQ ID NO: 1186 - RNA, 20 nt, synthetic construct
  source 1..20: mol_type = other RNA
tgtagtcccagctactcagg

SEQ ID NO: 1187 - RNA, 20 nt, synthetic construct
  source 1..20: mol_type = other RNA
cccagctactcaggaggctg

SEQ ID NO: 1188 - RNA, 20 nt, synthetic construct
  source 1..20: mol_type = other RNA
gctactcaggaggctgaggc

SEQ ID NO: 1189 - RNA, 20 nt, synthetic construct
  source 1..20: mol_type = other RNA
ggcaggagaattgcttgaac

SEQ ID NO: 1190 - RNA, 20 nt, synthetic construct
  source 1..20: mol_type = other RNA
gcaggagaattgcttgaact

SEQ ID NO: 1191 - RNA, 20 nt, synthetic construct
  source 1..20: mol_type = other RNA
gagaattgcttgaactggga

SEQ ID NO: 1192 - RNA, 20 nt, synthetic construct
  source 1..20: mol_type = other RNA
tgcttgaactgggaaggcag

SEQ ID NO: 1193 - RNA, 20 nt, synthetic construct
  source 1..20: mol_type = other RNA
ggagtgcagtagcgtgatct

SEQ ID NO: 1194 - RNA, 20 nt, synthetic construct
  source 1..20: mol_type = other RNA
cacgctactgcactccagtc

SEQ ID NO: 1195 - RNA, 20 nt, synthetic construct
  source 1..20: mol_type = other RNA
acgctactgcactccagtct

SEQ ID NO: 1196 - RNA, 20 nt, synthetic construct
  source 1..20: mol_type = other RNA
tcttgctctgttgcccagac

SEQ ID NO: 1197 - RNA, 20 nt, synthetic construct
  source 1..20: mol_type = other RNA
ctctatttttttttttgaga

SEQ ID NO: 1198 - RNA, 20 nt, synthetic construct
  source 1..20: mol_type = other RNA
caaaaaaaaaaatagagaaa

SEQ ID NO: 1199 - RNA, 20 nt, synthetic construct
  source 1..20: mol_type = other RNA
aaaaaaaaaaatagagaaat

SEQ ID NO: 1200 - RNA, 20 nt, synthetic construct
  source 1..20: mol_type = other RNA
aaaaaaaaaatagagaaatg

SEQ ID NO: 1201 - RNA, 20 nt, synthetic construct
  source 1..20: mol_type = other RNA
gagaaatggggtgcagagaa

SEQ ID NO: 1202 - RNA, 20 nt, synthetic construct
  source 1..20: mol_type = other RNA
aaatggggtgcagagaaagg

SEQ ID NO: 1203 - RNA, 20 nt, synthetic construct
  source 1..20: mol_type = other RNA
tctgctttcagctttttctc

SEQ ID NO: 1204 - RNA, 20 nt, synthetic construct
  source 1..20: mol_type = other RNA
ccccccccaacacacacagt

SEQ ID NO: 1205 - RNA, 20 nt, synthetic construct
  source 1..20: mol_type = other RNA
cccccccccaacacacacag

SEQ ID NO: 1206 - RNA, 20 nt, synthetic construct
  source 1..20: mol_type = other RNA
gcagagcccactgtgtgtgt

SEQ ID NO: 1207 - RNA, 20 nt, synthetic construct
  source 1..20: mol_type = other RNA
cagagcccactgtgtgtgtt

SEQ ID NO: 1208 - RNA, 20 nt, synthetic construct
  source 1..20: mol_type = other RNA
agagcccactgtgtgtgttg

SEQ ID NO: 1209 - RNA, 20 nt, synthetic construct
  source 1..20: mol_type = other RNA
gagcccactgtgtgtgttgg

SEQ ID NO: 1210 - RNA, 20 nt, synthetic construct
  source 1..20: mol_type = other RNA
agcccactgtgtgtgttggg

SEQ ID NO: 1211 - RNA, 20 nt, synthetic construct
  source 1..20: mol_type = other RNA
gcccactgtgtgtgttgggg

SEQ ID NO: 1212 - RNA, 20 nt, synthetic construct
  source 1..20: mol_type = other RNA
cccactgtgtgtgttggggg

SEQ ID NO: 1213 - RNA, 20 nt, synthetic construct
  source 1..20: mol_type = other RNA
ccactgtgtgtgttgggggg

SEQ ID NO: 1214 - RNA, 20 nt, synthetic construct
  source 1..20: mol_type = other RNA
ctcgctctccctctgtcttt

SEQ ID NO: 1215 - RNA, 20 nt, synthetic construct
  source 1..20: mol_type = other RNA
agacagaaaccgaaagacag

SEQ ID NO: 1216 - RNA, 20 nt, synthetic construct
  source 1..20: mol_type = other RNA
gacagaaaccgaaagacaga

SEQ ID NO: 1217 - RNA, 20 nt, synthetic construct
  source 1..20: mol_type = other RNA
agacagagggagagcgagaa

SEQ ID NO: 1218 - RNA, 20 nt, synthetic construct
  source 1..20: mol_type = other RNA
agagggagagcgagaaagga

SEQ ID NO: 1219 - RNA, 20 nt, synthetic construct
  source 1..20: mol_type = other RNA
gagggagagcgagaaaggaa

SEQ ID NO: 1220 - RNA, 20 nt, synthetic construct
  source 1..20: mol_type = other RNA
acagaaagagacagagagac

SEQ ID NO: 1221 - RNA, 20 nt, synthetic construct
  source 1..20: mol_type = other RNA
acagagagacaggcagagac

SEQ ID NO: 1222 - RNA, 20 nt, synthetic construct
  source 1..20: mol_type = other RNA
cagagagacaggcagagaca

SEQ ID NO: 1223 - RNA, 20 nt, synthetic construct
  source 1..20: mol_type = other RNA
caggcagagacagggagaaa

SEQ ID NO: 1224 - RNA, 20 nt, synthetic construct
  source 1..20: mol_type = other RNA
aggcagagacagggagaaaa

SEQ ID NO: 1225 - RNA, 20 nt, synthetic construct
  source 1..20: mol_type = other RNA
cagagacagggagaaaaggg

SEQ ID NO: 1226 - RNA, 20 nt, synthetic construct
  source 1..20: mol_type = other RNA
agagacagggagaaaaggga

SEQ ID NO: 1227 - RNA, 20 nt, synthetic construct
  source 1..20: mol_type = other RNA
cagggagaaaagggagggag

SEQ ID NO: 1228 - RNA, 20 nt, synthetic construct
  source 1..20: mol_type = other RNA
gagaaaagggagggagagga

SEQ ID NO: 1229 - RNA, 20 nt, synthetic construct
  source 1..20: mol_type = other RNA
aaagggagggagaggaagga

SEQ ID NO: 1230 - RNA, 20 nt, synthetic construct
  source 1..20: mol_type = other RNA
gggagggagaggaaggaagg

SEQ ID NO: 1231 - RNA, 20 nt, synthetic construct
  source 1..20: mol_type = other RNA
agggagaggaaggaaggtgg

SEQ ID NO: 1232 - RNA, 20 nt, synthetic construct
  source 1..20: mol_type = other RNA
ggaaggaaggtggaggctga

SEQ ID NO: 1233 - RNA, 20 nt, synthetic construct
  source 1..20: mol_type = other RNA
aggaaggtggaggctgatgg

SEQ ID NO: 1234 - RNA, 20 nt, synthetic construct
  source 1..20: mol_type = other RNA
gctgatggaggaagagaaaa

SEQ ID NO: 1235 - RNA, 20 nt, synthetic construct
  source 1..20: mol_type = other RNA
ctgatggaggaagagaaaaa

SEQ ID NO: 1236 - RNA, 20 nt, synthetic construct
  source 1..20: mol_type = other RNA
gaggaagagaaaaagggaga

SEQ ID NO: 1237 - RNA, 20 nt, synthetic construct
  source 1..20: mol_type = other RNA
gaagagaaaaagggagaagg

SEQ ID NO: 1238 - RNA, 20 nt, synthetic construct
  source 1..20: mol_type = other RNA
aagagaaaaagggagaaggt

SEQ ID NO: 1239 - RNA, 20 nt, synthetic construct
  source 1..20: mol_type = other RNA
agagaaaaagggagaaggtg

SEQ ID NO: 1240 - RNA, 20 nt, synthetic construct
  source 1..20: mol_type = other RNA
gagaaaaagggagaaggtgg

SEQ ID NO: 1241 - RNA, 20 nt, synthetic construct
  source 1..20: mol_type = other RNA
agagaataagaactcgctta

SEQ ID NO: 1242 - RNA, 20 nt, synthetic construct
  source 1..20: mol_type = other RNA
gagaataagaactcgcttac

SEQ ID NO: 1243 - RNA, 20 nt, synthetic construct
  source 1..20: mol_type = other RNA
gcttacgggagagagaatga

SEQ ID NO: 1244 - RNA, 20 nt, synthetic construct
  source 1..20: mol_type = other RNA
caccaacgctcttaaaaata

SEQ ID NO: 1245 - RNA, 20 nt, synthetic construct
  source 1..20: mol_type = other RNA
ggccttatttttaagagcgt

SEQ ID NO: 1246 - RNA, 20 nt, synthetic construct
  source 1..20: mol_type = other RNA
cttatttttaagagcgttgg

SEQ ID NO: 1247 - RNA, 20 nt, synthetic construct
  source 1..20: mol_type = other RNA
acagtgcaggcttgtctttc

SEQ ID NO: 1248 - RNA, 20 nt, synthetic construct
  source 1..20: mol_type = other RNA
gagtggaaagaggacagtgc

SEQ ID NO: 1249 - RNA, 20 nt, synthetic construct
  source 1..20: mol_type = other RNA
ccaaggatgtgagtggaaag

SEQ ID NO: 1250 - RNA, 20 nt, synthetic construct
  source 1..20: mol_type = other RNA
ggaggagccaaggatgtgag

SEQ ID NO: 1251 - RNA, 20 nt, synthetic construct
  source 1..20: mol_type = other RNA
cctctttccactcacatcct

SEQ ID NO: 1252 - RNA, 20 nt, synthetic construct
  source 1..20: mol_type = other RNA
gtaaaaagttggaggagcca

SEQ ID NO: 1253 - RNA, 20 nt, synthetic construct
  source 1..20: mol_type = other RNA
taggagacgtaaaaagttgg

SEQ ID NO: 1254 - RNA, 20 nt, synthetic construct
  source 1..20: mol_type = other RNA
gggtaggagacgtaaaaagt

SEQ ID NO: 1255 - RNA, 20 nt, synthetic construct
  source 1..20: mol_type = other RNA
ggacttctttgtaagtgggt

SEQ ID NO: 1256 - RNA, 20 nt, synthetic construct
  source 1..20: mol_type = other RNA
gggaggacttctttgtaagt

SEQ ID NO: 1257 - RNA, 20 nt, synthetic construct
  source 1..20: mol_type = other RNA
agggaggacttctttgtaag

SEQ ID NO: 1258 - RNA, 20 nt, synthetic construct
  source 1..20: mol_type = other RNA
tgtgacattacaatgaaggg

SEQ ID NO: 1259 - RNA, 20 nt, synthetic construct
  source 1..20: mol_type = other RNA
agttgtgacattacaatgaa

SEQ ID NO: 1260 - RNA, 20 nt, synthetic construct
  source 1..20: mol_type = other RNA
aagttgtgacattacaatga

SEQ ID NO: 1261 - RNA, 20 nt, synthetic construct
  source 1..20: mol_type = other RNA
ctttctttctttttttgaga

SEQ ID NO: 1262 - RNA, 20 nt, synthetic construct
  source 1..20: mol_type = other RNA
tttctttctttttttgagac

SEQ ID NO: 1263 - RNA, 20 nt, synthetic construct
  source 1..20: mol_type = other RNA
ttctttctttttttgagacg

SEQ ID NO: 1264 - RNA, 20 nt, synthetic construct
  source 1..20: mol_type = other RNA
cggggtctgttctcttgccc

SEQ ID NO: 1265 - RNA, 20 nt, synthetic construct
  source 1..20: mol_type = other RNA
gtctgttctcttgcccaggc

SEQ ID NO: 1266 - RNA, 20 nt, synthetic construct
  source 1..20: mol_type = other RNA
atgcgactacactccagcct

SEQ ID NO: 1267 - RNA, 20 nt, synthetic construct
  source 1..20: mol_type = other RNA
catgcgactacactccagcc

SEQ ID NO: 1268 - RNA, 20 nt, synthetic construct
  source 1..20: mol_type = other RNA
cacttaagcaccgcaaatgg

SEQ ID NO: 1269 - RNA, 20 nt, synthetic construct
  source 1..20: mol_type = other RNA
ctcactacagcctccatttg

SEQ ID NO: 1270 - RNA, 20 nt, synthetic construct
  source 1..20: mol_type = other RNA
gatcacttaagcaccgcaaa

SEQ ID NO: 1271 - RNA, 20 nt, synthetic construct
  source 1..20: mol_type = other RNA
agttgggaggctgaggtggg

SEQ ID NO: 1272 - RNA, 20 nt, synthetic construct
  source 1..20: mol_type = other RNA
gctagttgggaggctgaggt

SEQ ID NO: 1273 - RNA, 20 nt, synthetic construct
  source 1..20: mol_type = other RNA
agctagttgggaggctgagg

SEQ ID NO: 1274 - RNA, 20 nt, synthetic construct
  source 1..20: mol_type = other RNA
cccagctagttgggaggctg

SEQ ID NO: 1275 - RNA, 20 nt, synthetic construct
  source 1..20: mol_type = other RNA
tgtagtcccagctagttggg

SEQ ID NO: 1276 - RNA, 20 nt, synthetic construct
  source 1..20: mol_type = other RNA
gcctgtagtcccagctagtt

SEQ ID NO: 1277 - RNA, 20 nt, synthetic construct
  source 1..20: mol_type = other RNA
acctcagcctcccaactagc

SEQ ID NO: 1278 - RNA, 20 nt, synthetic construct
  source 1..20: mol_type = other RNA
tgcctgtagtcccagctagt

SEQ ID NO: 1279 - RNA, 20 nt, synthetic construct
  source 1..20: mol_type = other RNA
cctcagcctcccaactagct

SEQ ID NO: 1280 - RNA, 20 nt, synthetic construct
  source 1..20: mol_type = other RNA
tcccaactagctgggactac

SEQ ID NO: 1281 - RNA, 20 nt, synthetic construct
  source 1..20: mol_type = other RNA
aaaaaattagccaggcatag

SEQ ID NO: 1282 - RNA, 20 nt, synthetic construct
  source 1..20: mol_type = other RNA
caggcatgcaccactatgcc

SEQ ID NO: 1283 - RNA, 20 nt, synthetic construct
  source 1..20: mol_type = other RNA
taattaaaaaaaaattagcc

SEQ ID NO: 1284 - RNA, 20 nt, synthetic construct
  source 1..20: mol_type = other RNA
aattattttttgtagagatg

SEQ ID NO: 1285 - RNA, 20 nt, synthetic construct
  source 1..20: mol_type = other RNA
gaggtctcactatgttgacc

SEQ ID NO: 1286 - RNA, 20 nt, synthetic construct
  source 1..20: mol_type = other RNA
tcaggggttcgcaagcagcc

SEQ ID NO: 1287 - RNA, 20 nt, synthetic construct
  source 1..20: mol_type = other RNA
ggaggatcgcttgagctcag

SEQ ID NO: 1288 - RNA, 20 nt, synthetic construct
  source 1..20: mol_type = other RNA
gggaggatcgcttgagctca

SEQ ID NO: 1289 - RNA, 20 nt, synthetic construct
  source 1..20: mol_type = other RNA
tgggaggatcgcttgagctc

SEQ ID NO: 1290 - RNA, 20 nt, synthetic construct
  source 1..20: mol_type = other RNA
atttgggaggccaaggtggg

SEQ ID NO: 1291 - RNA, 20 nt, synthetic construct
  source 1..20: mol_type = other RNA
ctcaagcgatcctcccacct

SEQ ID NO: 1292 - RNA, 20 nt, synthetic construct
  source 1..20: mol_type = other RNA
gcaatttgggaggccaaggt

SEQ ID NO: 1293 - RNA, 20 nt, synthetic construct
  source 1..20: mol_type = other RNA
agcaatttgggaggccaagg

SEQ ID NO: 1294 - RNA, 20 nt, synthetic construct
  source 1..20: mol_type = other RNA
cccagcaatttgggaggcca

SEQ ID NO: 1295 - RNA, 20 nt, synthetic construct
  source 1..20: mol_type = other RNA
tgtaagcccagcaatttggg

SEQ ID NO: 1296 - RNA, 20 nt, synthetic construct
  source 1..20: mol_type = other RNA
gcctgtaagcccagcaattt

SEQ ID NO: 1297 - RNA, 20 nt, synthetic construct
  source 1..20: mol_type = other RNA
accttggcctcccaaattgc

SEQ ID NO: 1298 - RNA, 20 nt, synthetic construct
  source 1..20: mol_type = other RNA
tgcctgtaagcccagcaatt

SEQ ID NO: 1299 - RNA, 20 nt, synthetic construct
  source 1..20: mol_type = other RNA
ccttggcctcccaaattgct

SEQ ID NO: 1300 - RNA, 20 nt, synthetic construct
  source 1..20: mol_type = other RNA
tcccaaattgctgggcttac

SEQ ID NO: 1301 - RNA, 20 nt, synthetic construct
  source 1..20: mol_type = other RNA
tatgaccaggttgggtgtgg

SEQ ID NO: 1302 - RNA, 20 nt, synthetic construct
  source 1..20: mol_type = other RNA
agttatgaccaggttgggtg

SEQ ID NO: 1303 - RNA, 20 nt, synthetic construct
  source 1..20: mol_type = other RNA
atgagccaccacacccaacc

SEQ ID NO: 1304 - RNA, 20 nt, synthetic construct
  source 1..20: mol_type = other RNA
tagaaagttatgaccaggtt

SEQ ID NO: 1305 - RNA, 20 nt, synthetic construct
  source 1..20: mol_type = other RNA
ttagaaagttatgaccaggt

SEQ ID NO: 1306 - RNA, 20 nt, synthetic construct
  source 1..20: mol_type = other RNA
gtctttagaaagttatgacc

SEQ ID NO: 1307 - RNA, 20 nt, synthetic construct
  source 1..20: mol_type = other RNA
tggtcataactttctaaaga

SEQ ID NO: 1308 - RNA, 20 nt, synthetic construct
  source 1..20: mol_type = other RNA
acttgcatttcagaaggaga

SEQ ID NO: 1309 - RNA, 20 nt, synthetic construct
  source 1..20: mol_type = other RNA
ctcaagacttgcatttcaga

SEQ ID NO: 1310 - RNA, 20 nt, synthetic construct
  source 1..20: mol_type = other RNA
gattgcgcttaggctgtttc

SEQ ID NO: 1311 - RNA, 20 nt, synthetic construct
  source 1..20: mol_type = other RNA
gagggttctagattgcgctt

SEQ ID NO: 1312 - RNA, 20 nt, synthetic construct
  source 1..20: mol_type = other RNA
aggtcaagggagaagtaaga

SEQ ID NO: 1313 - RNA, 20 nt, synthetic construct
  source 1..20: mol_type = other RNA
aaggtcaagggagaagtaag

SEQ ID NO: 1314 - RNA, 20 nt, synthetic construct
  source 1..20: mol_type = other RNA
atcaaagggctcaaggtcaa

SEQ ID NO: 1315 - RNA, 20 nt, synthetic construct
  source 1..20: mol_type = other RNA
gatcaaagggctcaaggtca

SEQ ID NO: 1316 - RNA, 20 nt, synthetic construct
  source 1..20: mol_type = other RNA
gatggggatcaaagggctca

SEQ ID NO: 1317 - RNA, 20 nt, synthetic construct
  source 1..20: mol_type = other RNA
aaataaggatggggatcaaa

SEQ ID NO: 1318 - RNA, 20 nt, synthetic construct
  source 1..20: mol_type = other RNA
taaataaggatggggatcaa

SEQ ID NO: 1319 - RNA, 20 nt, synthetic construct
  source 1..20: mol_type = other RNA
ttaagtgttaaataaggatg

SEQ ID NO: 1320 - RNA, 20 nt, synthetic construct
  source 1..20: mol_type = other RNA
tttaagtgttaaataaggat

SEQ ID NO: 1321 - RNA, 20 nt, synthetic construct
  source 1..20: mol_type = other RNA
ctttaagtgttaaataagga

SEQ ID NO: 1322 - RNA, 20 nt, synthetic construct
  source 1..20: mol_type = other RNA
tcttctttaagtgttaaata

SEQ ID NO: 1323 - RNA, 20 nt, synthetic construct
  source 1..20: mol_type = other RNA
gaagaaaacagactctgccc

SEQ ID NO: 1324 - RNA, 20 nt, synthetic construct
  source 1..20: mol_type = other RNA
aagaaaacagactctgccca

SEQ ID NO: 1325 - RNA, 20 nt, synthetic construct
  source 1..20: mol_type = other RNA
agaaaacagactctgcccag

SEQ ID NO: 1326 - RNA, 20 nt, synthetic construct
  source 1..20: mol_type = other RNA
gggcaagttgcgtcacccct

SEQ ID NO: 1327 - RNA, 20 nt, synthetic construct
  source 1..20: mol_type = other RNA
tgggcaagttgcgtcacccc

SEQ ID NO: 1328 - RNA, 20 nt, synthetic construct
  source 1..20: mol_type = other RNA
aggggtgacgcaacttgccc

SEQ ID NO: 1329 - RNA, 20 nt, synthetic construct
  source 1..20: mol_type = other RNA
gcttcccacctgggggacct

SEQ ID NO: 1330 - RNA, 20 nt, synthetic construct
  source 1..20: mol_type = other RNA
cgcttcccacctgggggacc

SEQ ID NO: 1331 - RNA, 20 nt, synthetic construct
  source 1..20: mol_type = other RNA
gcaacttgcccaggtccccc

SEQ ID NO: 1332 - RNA, 20 nt, synthetic construct
  source 1..20: mol_type = other RNA
acttgcccaggtcccccagg

SEQ ID NO: 1333 - RNA, 20 nt, synthetic construct
  source 1..20: mol_type = other RNA
cttgcccaggtcccccaggt

SEQ ID NO: 1334 - RNA, 20 nt, synthetic construct
  source 1..20: mol_type = other RNA
cttcaccgcttcccacctgg

SEQ ID NO: 1335 - RNA, 20 nt, synthetic construct
  source 1..20: mol_type = other RNA
tcttcaccgcttcccacctg

SEQ ID NO: 1336 - RNA, 20 nt, synthetic construct
  source 1..20: mol_type = other RNA
gtcttcaccgcttcccacct

SEQ ID NO: 1337 - RNA, 20 nt, synthetic construct
  source 1..20: mol_type = other RNA
agtcttcaccgcttcccacc

SEQ ID NO: 1338 - RNA, 20 nt, synthetic construct
  source 1..20: mol_type = other RNA
caggtcccccaggtgggaag

SEQ ID NO: 1339 - RNA, 20 nt, synthetic construct
  source 1..20: mol_type = other RNA
aggtgggaagcggtgaagac

SEQ ID NO: 1340 - RNA, 20 nt, synthetic construct
  source 1..20: mol_type = other RNA
tgatcttcaacttagccttc

SEQ ID NO: 1341 - RNA, 20 nt, synthetic construct
  source 1..20: mol_type = other RNA
gatcttcaacttagccttca

SEQ ID NO: 1342 - RNA, 20 nt, synthetic construct
  source 1..20: mol_type = other RNA
aaatgcatttgatgccctga

SEQ ID NO: 1343 - RNA, 20 nt, synthetic construct
  source 1..20: mol_type = other RNA
tcagggcatcaaatgcattt

SEQ ID NO: 1344 - RNA, 20 nt, synthetic construct
  source 1..20: mol_type = other RNA
gggcatcaaatgcattttgg

SEQ ID NO: 1345 - RNA, 20 nt, synthetic construct
  source 1..20: mol_type = other RNA
gcattttggcggccttatct

SEQ ID NO: 1346 - RNA, 20 nt, synthetic construct
  source 1..20: mol_type = other RNA
cattttggcggccttatctt

SEQ ID NO: 1347 - RNA, 20 nt, synthetic construct
  source 1..20: mol_type = other RNA
ctgccctggtgcccaagata

SEQ ID NO: 1348 - RNA, 20 nt, synthetic construct
  source 1..20: mol_type = other RNA
gcggccttatcttgggcacc

SEQ ID NO: 1349 - RNA, 20 nt, synthetic construct
  source 1..20: mol_type = other RNA
cggccttatcttgggcacca

SEQ ID NO: 1350 - RNA, 20 nt, synthetic construct
  source 1..20: mol_type = other RNA
gctggtaaacaacactgccc

SEQ ID NO: 1351 - RNA, 20 nt, synthetic construct
  source 1..20: mol_type = other RNA
tgttgtcttggcaggaaagc

SEQ ID NO: 1352 - RNA, 20 nt, synthetic construct
  source 1..20: mol_type = other RNA
tgtagaaatgttgtcttggc

SEQ ID NO: 1353 - RNA, 20 nt, synthetic construct
  source 1..20: mol_type = other RNA
gccctgtagaaatgttgtct

SEQ ID NO: 1354 - RNA, 20 nt, synthetic construct
  source 1..20: mol_type = other RNA
tgccaagacaacatttctac

SEQ ID NO: 1355 - RNA, 20 nt, synthetic construct
  source 1..20: mol_type = other RNA
gccaagacaacatttctaca

SEQ ID NO: 1356 - RNA, 20 nt, synthetic construct
  source 1..20: mol_type = other RNA
agacaacatttctacagggc

SEQ ID NO: 1357 - RNA, 20 nt, synthetic construct
  source 1..20: mol_type = other RNA
tacagggctggttcttcttg

SEQ ID NO: 1358 - RNA, 20 nt, synthetic construct
  source 1..20: mol_type = other RNA
tggtcaaattctcacccaag

SEQ ID NO: 1359 - RNA, 20 nt, synthetic construct
  source 1..20: mol_type = other RNA
atagacgatggaaaccactt

SEQ ID NO: 1360 - RNA, 20 nt, synthetic construct
  source 1..20: mol_type = other RNA
aatagacgatggaaaccact

SEQ ID NO: 1361 - RNA, 20 nt, synthetic construct
  source 1..20: mol_type = other RNA
aagaggagtccaatagacga

SEQ ID NO: 1362 - RNA, 20 nt, synthetic construct
  source 1..20: mol_type = other RNA
aagtggtttccatcgtctat

SEQ ID NO: 1363 - RNA, 20 nt, synthetic construct
  source 1..20: mol_type = other RNA
taggaggaagagaattaaag

SEQ ID NO: 1364 - RNA, 20 nt, synthetic construct
  source 1..20: mol_type = other RNA
ttgcctaggtgactgttagg

SEQ ID NO: 1365 - RNA, 20 nt, synthetic construct
  source 1..20: mol_type = other RNA
cctttgcctaggtgactgtt

SEQ ID NO: 1366 - RNA, 20 nt, synthetic construct
  source 1..20: mol_type = other RNA
cttcctcctaacagtcacct

SEQ ID NO: 1367 - RNA, 20 nt, synthetic construct
  source 1..20: mol_type = other RNA
cctaacagtcacctaggcaa

SEQ ID NO: 1368 - RNA, 20 nt, synthetic construct
  source 1..20: mol_type = other RNA
gtaaagatgcccctttgcct

SEQ ID NO: 1369 - RNA, 20 nt, synthetic construct
  source 1..20: mol_type = other RNA
ctaacagtcacctaggcaaa

SEQ ID NO: 1370 - RNA, 20 nt, synthetic construct
  source 1..20: mol_type = other RNA
taacagtcacctaggcaaag

SEQ ID NO: 1371 - RNA, 20 nt, synthetic construct
  source 1..20: mol_type = other RNA
gccaagggagaatgtttggg

SEQ ID NO: 1372 - RNA, 20 nt, synthetic construct
  source 1..20: mol_type = other RNA
gaagccaagggagaatgttt

SEQ ID NO: 1373 - RNA, 20 nt, synthetic construct
  source 1..20: mol_type = other RNA
agaagccaagggagaatgtt

SEQ ID NO: 1374 - RNA, 20 nt, synthetic construct
  source 1..20: mol_type = other RNA
accacccaaacattctccct

SEQ ID NO: 1375 - RNA, 20 nt, synthetic construct
  source 1..20: mol_type = other RNA
cgcccctgttgagaagccaa

SEQ ID NO: 1376 - RNA, 20 nt, synthetic construct
  source 1..20: mol_type = other RNA
gcgcccctgttgagaagcca

SEQ ID NO: 1377 - RNA, 20 nt, synthetic construct
  source 1..20: mol_type = other RNA
ttctcccttggcttctcaac

SEQ ID NO: 1378 - RNA, 20 nt, synthetic construct
  source 1..20: mol_type = other RNA
tctcccttggcttctcaaca

SEQ ID NO: 1379 - RNA, 20 nt, synthetic construct
  source 1..20: mol_type = other RNA
ctcccttggcttctcaacag

SEQ ID NO: 1380 - RNA, 20 nt, synthetic construct
  source 1..20: mol_type = other RNA
aggggcgcagacagccagtg

SEQ ID NO: 1381 - RNA, 20 nt, synthetic construct
  source 1..20: mol_type = other RNA
tgccaccatcaagaccacac

SEQ ID NO: 1382 - RNA, 20 nt, synthetic construct
  source 1..20: mol_type = other RNA
gacagccagtgtggtcttga

SEQ ID NO: 1383 - RNA, 20 nt, synthetic construct
  source 1..20: mol_type = other RNA
agccagtgtggtcttgatgg

SEQ ID NO: 1384 - RNA, 20 nt, synthetic construct
  source 1..20: mol_type = other RNA
atggtggcacagatgccacc

SEQ ID NO: 1385 - RNA, 20 nt, synthetic construct
  source 1..20: mol_type = other RNA
tggtggcacagatgccacct

SEQ ID NO: 1386 - RNA, 20 nt, synthetic construct
  source 1..20: mol_type = other RNA
ggtggcacagatgccacctg

SEQ ID NO: 1387 - RNA, 20 nt, synthetic construct
  source 1..20: mol_type = other RNA
gtggcacagatgccacctgg

SEQ ID NO: 1388 - RNA, 20 nt, synthetic construct
  source 1..20: mol_type = other RNA
gttctggcttctcccccagg

SEQ ID NO: 1389 - RNA, 20 nt, synthetic construct
  source 1..20: mol_type = other RNA
aaggttctggcttctccccc

SEQ ID NO: 1390 - RNA, 20 nt, synthetic construct
  source 1..20: mol_type = other RNA
ccagggagagaggaaggttc

SEQ ID NO: 1391 - RNA, 20 nt, synthetic construct
  source 1..20: mol_type = other RNA
ctgcagccagggagagagga

SEQ ID NO: 1392 - RNA, 20 nt, synthetic construct
  source 1..20: mol_type = other RNA
ggggctgcagccagggagag

SEQ ID NO: 1393 - RNA, 20 nt, synthetic construct
  source 1..20: mol_type = other RNA
ccagaaccttcctctctccc

SEQ ID NO: 1394 - RNA, 20 nt, synthetic construct
  source 1..20: mol_type = other RNA
ggcaggaggggctgcagcca

SEQ ID NO: 1395 - RNA, 20 nt, synthetic construct
  source 1..20: mol_type = other RNA
gggcaggaggggctgcagcc

SEQ ID NO: 1396 - RNA, 20 nt, synthetic construct
  source 1..20: mol_type = other RNA
acatgtggctggggcaggag

SEQ ID NO: 1397 - RNA, 20 nt, synthetic construct
  source 1..20: mol_type = other RNA
cacatgtggctggggcagga

SEQ ID NO: 1398 - RNA, 20 nt, synthetic construct
  source 1..20: mol_type = other RNA
gcacatgtggctggggcagg

SEQ ID NO: 1399 - RNA, 20 nt, synthetic construct
  source 1..20: mol_type = other RNA
aaggcacatgtggctggggc

SEQ ID NO: 1400 - RNA, 20 nt, synthetic construct
  source 1..20: mol_type = other RNA
agtgaaggcacatgtggctg

SEQ ID NO: 1401 - RNA, 20 nt, synthetic construct
  source 1..20: mol_type = other RNA
cagtgaaggcacatgtggct

SEQ ID NO: 1402 - RNA, 20 nt, synthetic construct
  source 1..20: mol_type = other RNA
gcagtgaaggcacatgtggc

SEQ ID NO: 1403 - RNA, 20 nt, synthetic construct
  source 1..20: mol_type = other RNA
tccggcagtgaaggcacatg

SEQ ID NO: 1404 - RNA, 20 nt, synthetic construct
  source 1..20: mol_type = other RNA
gctgaagtgtccggcagtga

SEQ ID NO: 1405 - RNA, 20 nt, synthetic construct
  source 1..20: mol_type = other RNA
gccacatgtgccttcactgc

SEQ ID NO: 1406 - RNA, 20 nt, synthetic construct
  source 1..20: mol_type = other RNA
gtgggaggggctgaagtgtc

SEQ ID NO: 1407 - RNA, 20 nt, synthetic construct
  source 1..20: mol_type = other RNA
tcggaaagagggggtgggag

SEQ ID NO: 1408 - RNA, 20 nt, synthetic construct
  source 1..20: mol_type = other RNA
ctcggaaagagggggtggga

SEQ ID NO: 1409 - RNA, 20 nt, synthetic construct
  source 1..20: mol_type = other RNA
tctcggaaagagggggtggg

SEQ ID NO: 1410 - RNA, 20 nt, synthetic construct
  source 1..20: mol_type = other RNA
cactctcggaaagagggggt

SEQ ID NO: 1411 - RNA, 20 nt, synthetic construct
  source 1..20: mol_type = other RNA
gcactctcggaaagaggggg

SEQ ID NO: 1412 - RNA, 20 nt, synthetic construct
  source 1..20: mol_type = other RNA
ccagcactctcggaaagagg

SEQ ID NO: 1413 - RNA, 20 nt, synthetic construct
  source 1..20: mol_type = other RNA
accagcactctcggaaagag

SEQ ID NO: 1414 - RNA, 20 nt, synthetic construct
  source 1..20: mol_type = other RNA
aaccagcactctcggaaaga

SEQ ID NO: 1415 - RNA, 20 nt, synthetic construct
  source 1..20: mol_type = other RNA
gaaccagcactctcggaaag

SEQ ID NO: 1416 - RNA, 20 nt, synthetic construct
  source 1..20: mol_type = other RNA
ataacaggaaccagcactct

SEQ ID NO: 1417 - RNA, 20 nt, synthetic construct
  source 1..20: mol_type = other RNA
ccccctctttccgagagtgc

SEQ ID NO: 1418 - RNA, 20 nt, synthetic construct
  source 1..20: mol_type = other RNA
aggaaacagagttaaataac

SEQ ID NO: 1419 - RNA, 20 nt, synthetic construct
  source 1..20: mol_type = other RNA
tttaactctgtttcctccct

SEQ ID NO: 1420 - RNA, 20 nt, synthetic construct
  source 1..20: mol_type = other RNA
ttaactctgtttcctccctc

SEQ ID NO: 1421 - RNA, 20 nt, synthetic construct
  source 1..20: mol_type = other RNA
aatatattacctcccgaggg

SEQ ID NO: 1422 - RNA, 20 nt, synthetic construct
  source 1..20: mol_type = other RNA
actctgtttcctccctcggg

SEQ ID NO: 1423 - RNA, 20 nt, synthetic construct
  source 1..20: mol_type = other RNA
ataaatatattacctcccga

SEQ ID NO: 1424 - RNA, 20 nt, synthetic construct
  source 1..20: mol_type = other RNA
aataaatatattacctcccg

SEQ ID NO: 1425 - RNA, 20 nt, synthetic construct
  source 1..20: mol_type = other RNA
tccactttctggagtcacgt

SEQ ID NO: 1426 - RNA, 20 nt, synthetic construct
  source 1..20: mol_type = other RNA
ttccactttctggagtcacg

SEQ ID NO: 1427 - RNA, 20 nt, synthetic construct
  source 1..20: mol_type = other RNA
tcccacgtgactccagaaag

SEQ ID NO: 1428 - RNA, 20 nt, synthetic construct
  source 1..20: mol_type = other RNA
ccgagtgcagttccactttc

SEQ ID NO: 1429 - RNA, 20 nt, synthetic construct
  source 1..20: mol_type = other RNA
ccagaaagtggaactgcact

SEQ ID NO: 1430 - RNA, 20 nt, synthetic construct
  source 1..20: mol_type = other RNA
cagaaagtggaactgcactc

SEQ ID NO: 1431 - RNA, 20 nt, synthetic construct
  source 1..20: mol_type = other RNA
agaaagtggaactgcactcg

SEQ ID NO: 1432 - RNA, 20 nt, synthetic construct
  source 1..20: mol_type = other RNA
actgcactcggggcccagtg

SEQ ID NO: 1433 - RNA, 20 nt, synthetic construct
  source 1..20: mol_type = other RNA
agctccccgaagaccacact

SEQ ID NO: 1434 - RNA, 20 nt, synthetic construct
  source 1..20: mol_type = other RNA
cagctccccgaagaccacac

SEQ ID NO: 1435 - RNA, 20 nt, synthetic construct
  source 1..20: mol_type = other RNA
tcggggcccagtgtggtctt

SEQ ID NO: 1436 - RNA, 20 nt, synthetic construct
  source 1..20: mol_type = other RNA
cggggcccagtgtggtcttc

SEQ ID NO: 1437 - RNA, 20 nt, synthetic construct
  source 1..20: mol_type = other RNA
ggggcccagtgtggtcttcg

SEQ ID NO: 1438 - RNA, 20 nt, synthetic construct
  source 1..20: mol_type = other RNA
cagtgtggtcttcggggagc

SEQ ID NO: 1439 - RNA, 20 nt, synthetic construct
  source 1..20: mol_type = other RNA
agtgtggtcttcggggagct

SEQ ID NO: 1440 - RNA, 20 nt, synthetic construct
  source 1..20: mol_type = other RNA
gtggtcttcggggagctggg

SEQ ID NO: 1441 - RNA, 20 nt, synthetic construct
  source 1..20: mol_type = other RNA
tggtcttcggggagctggga

SEQ ID NO: 1442 - RNA, 20 nt, synthetic construct
  source 1..20: mol_type = other RNA
ggtcttcggggagctgggag

SEQ ID NO: 1443 - RNA, 20 nt, synthetic construct
  source 1..20: mol_type = other RNA
cggggagctgggaggggtgc

SEQ ID NO: 1444 - RNA, 20 nt, synthetic construct
  source 1..20: mol_type = other RNA
ggggagctgggaggggtgca

SEQ ID NO: 1445 - RNA, 20 nt, synthetic construct
  source 1..20: mol_type = other RNA
ggagggcagaaagagaaagc

SEQ ID NO: 1446 - RNA, 20 nt, synthetic construct
  source 1..20: mol_type = other RNA
ctggagggaagctggctgga

SEQ ID NO: 1447 - RNA, 20 nt, synthetic construct
  source 1..20: mol_type = other RNA
cctggagggaagctggctgg

SEQ ID NO: 1448 - RNA, 20 nt, synthetic construct
  source 1..20: mol_type = other RNA
agccctggagggaagctggc

SEQ ID NO: 1449 - RNA, 20 nt, synthetic construct
  source 1..20: mol_type = other RNA
tggcagccctggagggaagc

SEQ ID NO: 1450 - RNA, 20 nt, synthetic construct
  source 1..20: mol_type = other RNA
cctccagccagcttccctcc

SEQ ID NO: 1451 - RNA, 20 nt, synthetic construct
  source 1..20: mol_type = other RNA
ctccagccagcttccctcca

SEQ ID NO: 1452 - RNA, 20 nt, synthetic construct
  source 1..20: mol_type = other RNA
tcaagcctggcagccctgga

SEQ ID NO: 1453 - RNA, 20 nt, synthetic construct
  source 1..20: mol_type = other RNA
gtcaagcctggcagccctgg

SEQ ID NO: 1454 - RNA, 20 nt, synthetic construct
  source 1..20: mol_type = other RNA
caggtcaagcctggcagccc

SEQ ID NO: 1455 - RNA, 20 nt, synthetic construct
  source 1..20: mol_type = other RNA
agcttccctccagggctgcc

SEQ ID NO: 1456 - RNA, 20 nt, synthetic construct
  source 1..20: mol_type = other RNA
ccactgtcgcaggtcaagcc

SEQ ID NO: 1457 - RNA, 20 nt, synthetic construct
  source 1..20: mol_type = other RNA
gcacacctgcccactgtcgc

SEQ ID NO: 1458 - RNA, 20 nt, synthetic construct
  source 1..20: mol_type = other RNA
ccaggcttgacctgcgacag

SEQ ID NO: 1459 - RNA, 20 nt, synthetic construct
  source 1..20: mol_type = other RNA
caggcttgacctgcgacagt

SEQ ID NO: 1460 - RNA, 20 nt, synthetic construct
  source 1..20: mol_type = other RNA
cttgacctgcgacagtgggc

SEQ ID NO: 1461 - RNA, 20 nt, synthetic construct
  source 1..20: mol_type = other RNA
gtgggcaggtgtgctgctgc

SEQ ID NO: 1462 - RNA, 20 nt, synthetic construct
  source 1..20: mol_type = other RNA
tgggcaggtgtgctgctgct

SEQ ID NO: 1463 - RNA, 20 nt, synthetic construct
  source 1..20: mol_type = other RNA
tgctgctgggcagctctcag

SEQ ID NO: 1464 - RNA, 20 nt, synthetic construct
  source 1..20: mol_type = other RNA
gctgctgggcagctctcaga

SEQ ID NO: 1465 - RNA, 20 nt, synthetic construct
  source 1..20: mol_type = other RNA
ctgctgggcagctctcagag

SEQ ID NO: 1466 - RNA, 20 nt, synthetic construct
  source 1..20: mol_type = other RNA
gctctcagaggggaagaaag

SEQ ID NO: 1467 - RNA, 20 nt, synthetic construct
  source 1..20: mol_type = other RNA
cagaggggaagaaagaggac

SEQ ID NO: 1468 - RNA, 20 nt, synthetic construct
  source 1..20: mol_type = other RNA
agaggggaagaaagaggaca

SEQ ID NO: 1469 - RNA, 20 nt, synthetic construct
  source 1..20: mol_type = other RNA
gacagggcaagagaattgca

SEQ ID NO: 1470 - RNA, 20 nt, synthetic construct
  source 1..20: mol_type = other RNA
attgcatggtttgtaaacaa

SEQ ID NO: 1471 - RNA, 20 nt, synthetic construct
  source 1..20: mol_type = other RNA
ttgcatggtttgtaaacaaa

SEQ ID NO: 1472 - RNA, 20 nt, synthetic construct
  source 1..20: mol_type = other RNA
ggcactgactttcattttga

SEQ ID NO: 1473 - RNA, 20 nt, synthetic construct
  source 1..20: mol_type = other RNA
gcactgactttcattttgat

SEQ ID NO: 1474 - RNA, 20 nt, synthetic construct
  source 1..20: mol_type = other RNA
cactgactttcattttgatg

SEQ ID NO: 1475 - RNA, 20 nt, synthetic construct
  source 1..20: mol_type = other RNA
actgactttcattttgatgg

SEQ ID NO: 1476 - RNA, 20 nt, synthetic construct
  source 1..20: mol_type = other RNA
ctttcattttgatgggggtt

SEQ ID NO: 1477 - RNA, 20 nt, synthetic construct
  source 1..20: mol_type = other RNA
ttttgatgggggttcggaaa

SEQ ID NO: 1478 - RNA, 20 nt, synthetic construct
  source 1..20: mol_type = other RNA
ggaaaaggaaatcatccatg

SEQ ID NO: 1479 - RNA, 20 nt, synthetic construct
  source 1..20: mol_type = other RNA
gaaaaggaaatcatccatgt

SEQ ID NO: 1480 - RNA, 20 nt, synthetic construct
  source 1..20: mol_type = other RNA
aaaaggaaatcatccatgtg

SEQ ID NO: 1481 - RNA, 20 nt, synthetic construct
  source 1..20: mol_type = other RNA
agggtcacaaaaaccccaca

SEQ ID NO: 1482 - RNA, 20 nt, synthetic construct
  source 1..20: mol_type = other RNA
tatagagtggttgagaggga

SEQ ID NO: 1483 - RNA, 20 nt, synthetic construct
  source 1..20: mol_type = other RNA
ttatagagtggttgagaggg

SEQ ID NO: 1484 - RNA, 20 nt, synthetic construct
  source 1..20: mol_type = other RNA
tcattatagagtggttgaga

SEQ ID NO: 1485 - RNA, 20 nt, synthetic construct
  source 1..20: mol_type = other RNA
gtcattatagagtggttgag

SEQ ID NO: 1486 - RNA, 20 nt, synthetic construct
  source 1..20: mol_type = other RNA
gggccaaggtcattatagag

SEQ ID NO: 1487 - RNA, 20 nt, synthetic construct
  source 1..20: mol_type = other RNA
caaccactctataatgacct

SEQ ID NO: 1488 - RNA, 20 nt, synthetic construct
  source 1..20: mol_type = other RNA
tttagcacagcagagggcca

SEQ ID NO: 1489 - RNA, 20 nt, synthetic construct
  source 1..20: mol_type = other RNA
gcagcgtttagcacagcaga

SEQ ID NO: 1490 - RNA, 20 nt, synthetic construct
  source 1..20: mol_type = other RNA
tgcagcgtttagcacagcag

SEQ ID NO: 1491 - RNA, 20 nt, synthetic construct
  source 1..20: mol_type = other RNA
tgctgtgctaaacgctgcac

SEQ ID NO: 1492 - RNA, 20 nt, synthetic construct
  source 1..20: mol_type = other RNA
gctttttctctgagtaacgt

SEQ ID NO: 1493 - RNA, 20 nt, synthetic construct
  source 1..20: mol_type = other RNA
agctttttctctgagtaacg

SEQ ID NO: 1494 - RNA, 20 nt, synthetic construct
  source 1..20: mol_type = other RNA
ctcagagaaaaagctaaatc

SEQ ID NO: 1495 - RNA, 20 nt, synthetic construct
  source 1..20: mol_type = other RNA
aaaaagctaaatctggacaa

SEQ ID NO: 1496 - RNA, 20 nt, synthetic construct
  source 1..20: mol_type = other RNA
aatctggacaatggcccaca

SEQ ID NO: 1497 - RNA, 20 nt, synthetic construct
  source 1..20: mol_type = other RNA
tgaggtaggaaaggccttgt

SEQ ID NO: 1498 - RNA, 20 nt, synthetic construct
  source 1..20: mol_type = other RNA
atgaggtaggaaaggccttg

SEQ ID NO: 1499 - RNA, 20 nt, synthetic construct
  source 1..20: mol_type = other RNA
gggagctgatgaggtaggaa

SEQ ID NO: 1500 - RNA, 20 nt, synthetic construct
  source 1..20: mol_type = other RNA
gagcagggagctgatgaggt

SEQ ID NO: 1501 - RNA, 20 nt, synthetic construct
  source 1..20: mol_type = other RNA
atgagagcagggagctgatg

SEQ ID NO: 1502 - RNA, 20 nt, synthetic construct
  source 1..20: mol_type = other RNA
aggagtaggggatgagagca

SEQ ID NO: 1503 - RNA, 20 nt, synthetic construct
  source 1..20: mol_type = other RNA
caggagtaggggatgagagc

SEQ ID NO: 1504 - RNA, 20 nt, synthetic construct
  source 1..20: mol_type = other RNA
aacaaggcagacaggagtag

SEQ ID NO: 1505 - RNA, 20 nt, synthetic construct
  source 1..20: mol_type = other RNA
gaacaaggcagacaggagta

SEQ ID NO: 1506 - RNA, 20 nt, synthetic construct
  source 1..20: mol_type = other RNA
tgaacaaggcagacaggagt

SEQ ID NO: 1507 - RNA, 20 nt, synthetic construct
  source 1..20: mol_type = other RNA
agtagatgaacaaggcagac

SEQ ID NO: 1508 - RNA, 20 nt, synthetic construct
  source 1..20: mol_type = other RNA
atggctggagtagatgaaca

SEQ ID NO: 1509 - RNA, 20 nt, synthetic construct
  source 1..20: mol_type = other RNA
agcgagggtgccaacatggc

SEQ ID NO: 1510 - RNA, 20 nt, synthetic construct
  source 1..20: mol_type = other RNA
ttcatctactccagccatgt

SEQ ID NO: 1511 - RNA, 20 nt, synthetic construct
  source 1..20: mol_type = other RNA
gaacagcgagggtgccaaca

SEQ ID NO: 1512 - RNA, 20 nt, synthetic construct
  source 1..20: mol_type = other RNA
gcgtgtctaaggaacagcga

SEQ ID NO: 1513 - RNA, 20 nt, synthetic construct
  source 1..20: mol_type = other RNA
agcgtgtctaaggaacagcg

SEQ ID NO: 1514 - RNA, 20 nt, synthetic construct
  source 1..20: mol_type = other RNA
cagtgtgctgagcgtgtcta

SEQ ID NO: 1515 - RNA, 20 nt, synthetic construct
  source 1..20: mol_type = other RNA
cggcatgtgcaaaggttctg

SEQ ID NO: 1516 - RNA, 20 nt, synthetic construct
  source 1..20: mol_type = other RNA
agagggaacggcatgtgcaa

SEQ ID NO: 1517 - RNA, 20 nt, synthetic construct
  source 1..20: mol_type = other RNA
agtgctccaggcagagggaa

SEQ ID NO: 1518 - RNA, 20 nt, synthetic construct
  source 1..20: mol_type = other RNA
cacatgccgttccctctgcc

SEQ ID NO: 1519 - RNA, 20 nt, synthetic construct
  source 1..20: mol_type = other RNA
agaacagtgctccaggcaga

SEQ ID NO: 1520 - RNA, 20 nt, synthetic construct
  source 1..20: mol_type = other RNA
gagaacagtgctccaggcag

SEQ ID NO: 1521 - RNA, 20 nt, synthetic construct
  source 1..20: mol_type = other RNA
tgcttagagaacagtgctcc

SEQ ID NO: 1522 - RNA, 20 nt, synthetic construct
  source 1..20: mol_type = other RNA
ctgttctctaagcattttct

SEQ ID NO: 1523 - RNA, 20 nt, synthetic construct
  source 1..20: mol_type = other RNA
aagaatagaaggaatttagg

SEQ ID NO: 1524 - RNA, 20 nt, synthetic construct
  source 1..20: mol_type = other RNA
gcaaagaatagaaggaattt

SEQ ID NO: 1525 - RNA, 20 nt, synthetic construct
  source 1..20: mol_type = other RNA
gataaggtgcaaagaataga

SEQ ID NO: 1526 - RNA, 20 nt, synthetic construct
  source 1..20: mol_type = other RNA
cagggcaggcttcattgata

SEQ ID NO: 1527 - RNA, 20 nt, synthetic construct
  source 1..20: mol_type = other RNA
ctaaatggcttggtcagggc

SEQ ID NO: 1528 - RNA, 20 nt, synthetic construct
  source 1..20: mol_type = other RNA
aattctaaatggcttggtca

SEQ ID NO: 1529 - RNA, 20 nt, synthetic construct
  source 1..20: mol_type = other RNA
caattctaaatggcttggtc

SEQ ID NO: 1530 - RNA, 20 nt, synthetic construct
  source 1..20: mol_type = other RNA
agttgcaattctaaatggct

SEQ ID NO: 1531 - RNA, 20 nt, synthetic construct
  source 1..20: mol_type = other RNA
ggaggagttgcaattctaaa

SEQ ID NO: 1532 - RNA, 20 nt, synthetic construct
  source 1..20: mol_type = other RNA
ggggctcagagtgtggaggg

SEQ ID NO: 1533 - RNA, 20 nt, synthetic construct
  source 1..20: mol_type = other RNA
gagggggctcagagtgtgga

SEQ ID NO: 1534 - RNA, 20 nt, synthetic construct
  source 1..20: mol_type = other RNA
ggagggggctcagagtgtgg

SEQ ID NO: 1535 - RNA, 20 nt, synthetic construct
  source 1..20: mol_type = other RNA
tggggagggggctcagagtg

SEQ ID NO: 1536 - RNA, 20 nt, synthetic construct
  source 1..20: mol_type = other RNA
aaaaaatcaatctggggagg

SEQ ID NO: 1537 - RNA, 20 nt, synthetic construct
  source 1..20: mol_type = other RNA
gaaaaaatcaatctggggag

SEQ ID NO: 1538 - RNA, 20 nt, synthetic construct
  source 1..20: mol_type = other RNA
ggaaaaaatcaatctgggga

SEQ ID NO: 1539 - RNA, 20 nt, synthetic construct
  source 1..20: mol_type = other RNA
gggaaaaaatcaatctgggg

SEQ ID NO: 1540 - RNA, 20 nt, synthetic construct
  source 1..20: mol_type = other RNA
gtggggaaaaaatcaatctg

SEQ ID NO: 1541 - RNA, 20 nt, synthetic construct
  source 1..20: mol_type = other RNA
agtggggaaaaaatcaatct

SEQ ID NO: 1542 - RNA, 20 nt, synthetic construct
  source 1..20: mol_type = other RNA
aagtggggaaaaaatcaatc

SEQ ID NO: 1543 - RNA, 20 nt, synthetic construct
  source 1..20: mol_type = other RNA
tatcaaaaaaaaaaaaagtg

SEQ ID NO: 1544 - RNA, 20 nt, synthetic construct
  source 1..20: mol_type = other RNA
gtatcaaaaaaaaaaaaagt

SEQ ID NO: 1545 - RNA, 20 nt, synthetic construct
  source 1..20: mol_type = other RNA
tgtatcaaaaaaaaaaaaag

SEQ ID NO: 1546 - RNA, 20 nt, synthetic construct
  source 1..20: mol_type = other RNA
tcttgctctatcgcccagcc

SEQ ID NO: 1547 - RNA, 20 nt, synthetic construct
  source 1..20: mol_type = other RNA
tcaccactgcactccaggct

SEQ ID NO: 1548 - RNA, 20 nt, synthetic construct
  source 1..20: mol_type = other RNA
ctcaccactgcactccaggc

SEQ ID NO: 1549 - RNA, 20 nt, synthetic construct
  source 1..20: mol_type = other RNA
agatctcaccactgcactcc

SEQ ID NO: 1550 - RNA, 20 nt, synthetic construct
  source 1..20: mol_type = other RNA
tcgcccagcctggagtgcag

SEQ ID NO: 1551 - RNA, 20 nt, synthetic construct
  source 1..20: mol_type = other RNA
cactgcaacttccatctccc

SEQ ID NO: 1552 - RNA, 20 nt, synthetic construct
  source 1..20: mol_type = other RNA
aactgcatgaacctgggaga

SEQ ID NO: 1553 - RNA, 20 nt, synthetic construct
  source 1..20: mol_type = other RNA
catgagaactgcatgaacct

SEQ ID NO: 1554 - RNA, 20 nt, synthetic construct
  source 1..20: mol_type = other RNA
gcatgagaactgcatgaacc

SEQ ID NO: 1555 - RNA, 20 nt, synthetic construct
  source 1..20: mol_type = other RNA
cccagctatttgggaggctg

SEQ ID NO: 1556 - RNA, 20 nt, synthetic construct
  source 1..20: mol_type = other RNA
tgtaatcccagctatttggg

SEQ ID NO: 1557 - RNA, 20 nt, synthetic construct
  source 1..20: mol_type = other RNA
acctgtaatcccagctattt

SEQ ID NO: 1558 - RNA, 20 nt, synthetic construct
  source 1..20: mol_type = other RNA
gcctcagcctcccaaatagc

SEQ ID NO: 1559 - RNA, 20 nt, synthetic construct
  source 1..20: mol_type = other RNA
aacctgtaatcccagctatt

SEQ ID NO: 1560 - RNA, 20 nt, synthetic construct
  source 1..20: mol_type = other RNA
cctcagcctcccaaatagct

SEQ ID NO: 1561 - RNA, 20 nt, synthetic construct
  source 1..20: mol_type = other RNA
tcccaaatagctgggattac

SEQ ID NO: 1562 - RNA, 20 nt, synthetic construct
  source 1..20: mol_type = other RNA
caaaaattagccaggcatag

SEQ ID NO: 1563 - RNA, 20 nt, synthetic construct
  source 1..20: mol_type = other RNA
caggtttgtgccactatgcc

SEQ ID NO: 1564 - RNA, 20 nt, synthetic construct
  source 1..20: mol_type = other RNA
taaaaatacaaaaattagcc

SEQ ID NO: 1565 - RNA, 20 nt, synthetic construct
  source 1..20: mol_type = other RNA
atttttgtatttttagagac

SEQ ID NO: 1566 - RNA, 20 nt, synthetic construct
  source 1..20: mol_type = other RNA
tttttgtatttttagagaca

SEQ ID NO: 1567 - RNA, 20 nt, synthetic construct
  source 1..20: mol_type = other RNA
gagacagggtttctccaagt

SEQ ID NO: 1568 - RNA, 20 nt, synthetic construct
  source 1..20: mol_type = other RNA
caagaccagcctggccaact

SEQ ID NO: 1569 - RNA, 20 nt, synthetic construct
  source 1..20: mol_type = other RNA
agggtttctccaagttggcc

SEQ ID NO: 1570 - RNA, 20 nt, synthetic construct
  source 1..20: mol_type = other RNA
tttctccaagttggccaggc

SEQ ID NO: 1571 - RNA, 20 nt, synthetic construct
  source 1..20: mol_type = other RNA
tcaggagttcaagaccagcc

SEQ ID NO: 1572 - RNA, 20 nt, synthetic construct
  source 1..20: mol_type = other RNA
tgggcggatcacttgatgtc

SEQ ID NO: 1573 - RNA, 20 nt, synthetic construct
  source 1..20: mol_type = other RNA
ccagtactttgtggggtggg

SEQ ID NO: 1574 - RNA, 20 nt, synthetic construct
  source 1..20: mol_type = other RNA
atcccagtactttgtggggt

SEQ ID NO: 1575 - RNA, 20 nt, synthetic construct
  source 1..20: mol_type = other RNA
tatcccagtactttgtgggg

SEQ ID NO: 1576 - RNA, 20 nt, synthetic construct
  source 1..20: mol_type = other RNA
tgttatcccagtactttgtg

SEQ ID NO: 1577 - RNA, 20 nt, synthetic construct
  source 1..20: mol_type = other RNA
ctgttatcccagtactttgt

SEQ ID NO: 1578 - RNA, 20 nt, synthetic construct
  source 1..20: mol_type = other RNA
cctgttatcccagtactttg

SEQ ID NO: 1579 - RNA, 20 nt, synthetic construct
  source 1..20: mol_type = other RNA
ccgcccaccccacaaagtac

SEQ ID NO: 1580 - RNA, 20 nt, synthetic construct
  source 1..20: mol_type = other RNA
cgcccaccccacaaagtact

SEQ ID NO: 1581 - RNA, 20 nt, synthetic construct
  source 1..20: mol_type = other RNA
ccacaaagtactgggataac

SEQ ID NO: 1582 - RNA, 20 nt, synthetic construct
  source 1..20: mol_type = other RNA
aggtggggagccaggcgcag

SEQ ID NO: 1583 - RNA, 20 nt, synthetic construct
  source 1..20: mol_type = other RNA
caggcatgagccactgcgcc

SEQ ID NO: 1584 - RNA, 20 nt, synthetic construct
  source 1..20: mol_type = other RNA
tatacagaaggtggggagcc

SEQ ID NO: 1585 - RNA, 20 nt, synthetic construct
  source 1..20: mol_type = other RNA
agtaagatatacagaaggtg

SEQ ID NO: 1586 - RNA, 20 nt, synthetic construct
  source 1..20: mol_type = other RNA
aagtaagatatacagaaggt

SEQ ID NO: 1587 - RNA, 20 nt, synthetic construct
  source 1..20: mol_type = other RNA
aaagtaagatatacagaagg

SEQ ID NO: 1588 - RNA, 20 nt, synthetic construct
  source 1..20: mol_type = other RNA
acaaaagtaagatatacaga

SEQ ID NO: 1589 - RNA, 20 nt, synthetic construct
  source 1..20: mol_type = other RNA
ttattgtttgaccctcccac

SEQ ID NO: 1590 - RNA, 20 nt, synthetic construct
  source 1..20: mol_type = other RNA
gagtttattttccagtggga

SEQ ID NO: 1591 - RNA, 20 nt, synthetic construct
  source 1..20: mol_type = other RNA
ggagtttattttccagtggg

SEQ ID NO: 1592 - RNA, 20 nt, synthetic construct
  source 1..20: mol_type = other RNA
tgtggagtttattttccagt

SEQ ID NO: 1593 - RNA, 20 nt, synthetic construct
  source 1..20: mol_type = other RNA
atgtggagtttattttccag

SEQ ID NO: 1594 - RNA, 20 nt, synthetic construct
  source 1..20: mol_type = other RNA
actggaaaataaactccaca

SEQ ID NO: 1595 - RNA, 20 nt, synthetic construct
  source 1..20: mol_type = other RNA
aacatagatccatgtccatg

SEQ ID NO: 1596 - RNA, 20 nt, synthetic construct
  source 1..20: mol_type = other RNA
aaataaactccacatggaca

SEQ ID NO: 1597 - RNA, 20 nt, synthetic construct
  source 1..20: mol_type = other RNA
aggccctgtgctaggtattt

SEQ ID NO: 1598 - RNA, 20 nt, synthetic construct
  source 1..20: mol_type = other RNA
caggccctgtgctaggtatt

SEQ ID NO: 1599 - RNA, 20 nt, synthetic construct
  source 1..20: mol_type = other RNA
atgtcccaaatacctagcac

SEQ ID NO: 1600 - RNA, 20 nt, synthetic construct
  source 1..20: mol_type = other RNA
tgtcccaaatacctagcaca

SEQ ID NO: 1601 - RNA, 20 nt, synthetic construct
  source 1..20: mol_type = other RNA
ctgtgctcaggccctgtgct

SEQ ID NO: 1602 - RNA, 20 nt, synthetic construct
  source 1..20: mol_type = other RNA
ctagcacagggcctgagcac

SEQ ID NO: 1603 - RNA, 20 nt, synthetic construct
  source 1..20: mol_type = other RNA
tgcatacctaccctgtgctc

SEQ ID NO: 1604 - RNA, 20 nt, synthetic construct
  source 1..20: mol_type = other RNA
tagcacagggcctgagcaca

SEQ ID NO: 1605 - RNA, 20 nt, synthetic construct
  source 1..20: mol_type = other RNA
acagggcctgagcacagggt

SEQ ID NO: 1606 - RNA, 20 nt, synthetic construct
  source 1..20: mol_type = other RNA
tatatttgttgaatgttcag

SEQ ID NO: 1607 - RNA, 20 nt, synthetic construct
  source 1..20: mol_type = other RNA
tttgttgaatgttcagtgga

SEQ ID NO: 1608 - RNA, 20 nt, synthetic construct
  source 1..20: mol_type = other RNA
tggatggatgcgttgatgag

SEQ ID NO: 1609 - RNA, 20 nt, synthetic construct
  source 1..20: mol_type = other RNA
ggatggatgcgttgatgagt

SEQ ID NO: 1610 - RNA, 20 nt, synthetic construct
  source 1..20: mol_type = other RNA
tgcgttgatgagtgggtaga

SEQ ID NO: 1611 - RNA, 20 nt, synthetic construct
  source 1..20: mol_type = other RNA
tgagtgggtagatggatgaa

SEQ ID NO: 1612 - RNA, 20 nt, synthetic construct
  source 1..20: mol_type = other RNA
cattggtaaagtaggaataa

SEQ ID NO: 1613 - RNA, 20 nt, synthetic construct
  source 1..20: mol_type = other RNA
agtttactcattggtaaagt

SEQ ID NO: 1614 - RNA, 20 nt, synthetic construct
  source 1..20: mol_type = other RNA
ctgtgcctcagtttactcat

SEQ ID NO: 1615 - RNA, 20 nt, synthetic construct
  source 1..20: mol_type = other RNA
ctttaccaatgagtaaactg

SEQ ID NO: 1616 - RNA, 20 nt, synthetic construct
  source 1..20: mol_type = other RNA
agaagttaatgatttgcctc

SEQ ID NO: 1617 - RNA, 20 nt, synthetic construct
  source 1..20: mol_type = other RNA
cctcctcaggtcatgaccag

SEQ ID NO: 1618 - RNA, 20 nt, synthetic construct
  source 1..20: mol_type = other RNA
ttgcctctggtcatgacctg

SEQ ID NO: 1619 - RNA, 20 nt, synthetic construct
  source 1..20: mol_type = other RNA
cctctggtcatgacctgagg

SEQ ID NO: 1620 - RNA, 20 nt, synthetic construct
  source 1..20: mol_type = other RNA
ctctggtcatgacctgagga

SEQ ID NO: 1621 - RNA, 20 nt, synthetic construct
  source 1..20: mol_type = other RNA
accccatagtctccctcctc

SEQ ID NO: 1622 - RNA, 20 nt, synthetic construct
  source 1..20: mol_type = other RNA
tgacctgaggagggagacta

SEQ ID NO: 1623 - RNA, 20 nt, synthetic construct
  source 1..20: mol_type = other RNA
gacctgaggagggagactat

SEQ ID NO: 1624 - RNA, 20 nt, synthetic construct
  source 1..20: mol_type = other RNA
acctgaggagggagactatg

SEQ ID NO: 1625 - RNA, 20 nt, synthetic construct
  source 1..20: mol_type = other RNA
ctatggggtctcatgagtcc

SEQ ID NO: 1626 - RNA, 20 nt, synthetic construct
  source 1..20: mol_type = other RNA
aggaagtactgcaattggcc

SEQ ID NO: 1627 - RNA, 20 nt, synthetic construct
  source 1..20: mol_type = other RNA
tttgcaggaagtactgcaat

SEQ ID NO: 1628 - RNA, 20 nt, synthetic construct
  source 1..20: mol_type = other RNA
ccccttgggttgtttagaag

SEQ ID NO: 1629 - RNA, 20 nt, synthetic construct
  source 1..20: mol_type = other RNA
ttcctcttctaaacaaccca

SEQ ID NO: 1630 - RNA, 20 nt, synthetic construct
  source 1..20: mol_type = other RNA
tcctcttctaaacaacccaa

SEQ ID NO: 1631 - RNA, 20 nt, synthetic construct
  source 1..20: mol_type = other RNA
cctcttctaaacaacccaag

SEQ ID NO: 1632 - RNA, 20 nt, synthetic construct
  source 1..20: mol_type = other RNA
tagatttacggtagcccctt

SEQ ID NO: 1633 - RNA, 20 nt, synthetic construct
  source 1..20: mol_type = other RNA
gtagatttacggtagcccct

SEQ ID NO: 1634 - RNA, 20 nt, synthetic construct
  source 1..20: mol_type = other RNA
ccctatttggggtagattta

SEQ ID NO: 1635 - RNA, 20 nt, synthetic construct
  source 1..20: mol_type = other RNA
accgtaaatctaccccaaat

SEQ ID NO: 1636 - RNA, 20 nt, synthetic construct
  source 1..20: mol_type = other RNA
ccgtaaatctaccccaaata

SEQ ID NO: 1637 - RNA, 20 nt, synthetic construct
  source 1..20: mol_type = other RNA
gaagactgccaccctatttg

SEQ ID NO: 1638 - RNA, 20 nt, synthetic construct
  source 1..20: mol_type = other RNA
tgaagactgccaccctattt

SEQ ID NO: 1639 - RNA, 20 nt, synthetic construct
  source 1..20: mol_type = other RNA
ttgaagactgccaccctatt

SEQ ID NO: 1640 - RNA, 20 nt, synthetic construct
  source 1..20: mol_type = other RNA
taaatctaccccaaataggg

SEQ ID NO: 1641 - RNA, 20 nt, synthetic construct
  source 1..20: mol_type = other RNA
ggacttctgaatcatcaggc

SEQ ID NO: 1642 - RNA, 20 nt, synthetic construct
  source 1..20: mol_type = other RNA
aaggggacttctgaatcatc

SEQ ID NO: 1643 - RNA, 20 nt, synthetic construct
  source 1..20: mol_type = other RNA
aggcactgcaatatctgaag

SEQ ID NO: 1644 - RNA, 20 nt, synthetic construct
  source 1..20: mol_type = other RNA
aaggcactgcaatatctgaa

SEQ ID NO: 1645 - RNA, 20 nt, synthetic construct
  source 1..20: mol_type = other RNA
taaggcactgcaatatctga

SEQ ID NO: 1646 - RNA, 20 nt, synthetic construct
  source 1..20: mol_type = other RNA
ttcagatattgcagtgcctt

SEQ ID NO: 1647 - RNA, 20 nt, synthetic construct
  source 1..20: mol_type = other RNA
tttctgcacaattgcaccta

SEQ ID NO: 1648 - RNA, 20 nt, synthetic construct
  source 1..20: mol_type = other RNA
ttgtgcagaaagcccagttc

SEQ ID NO: 1649 - RNA, 20 nt, synthetic construct
  source 1..20: mol_type = other RNA
aagctcccatctccagaact

SEQ ID NO: 1650 - RNA, 20 nt, synthetic construct
  source 1..20: mol_type = other RNA
taagctcccatctccagaac

SEQ ID NO: 1651 - RNA, 20 nt, synthetic construct
  source 1..20: mol_type = other RNA
agaaagcccagttctggaga

SEQ ID NO: 1652 - RNA, 20 nt, synthetic construct
  source 1..20: mol_type = other RNA
gaaagcccagttctggagat

SEQ ID NO: 1653 - RNA, 20 nt, synthetic construct
  source 1..20: mol_type = other RNA
agttctggagatgggagctt

SEQ ID NO: 1654 - RNA, 20 nt, synthetic construct
  source 1..20: mol_type = other RNA
gttctggagatgggagctta

SEQ ID NO: 1655 - RNA, 20 nt, synthetic construct
  source 1..20: mol_type = other RNA
ttctggagatgggagcttag

SEQ ID NO: 1656 - RNA, 20 nt, synthetic construct
  source 1..20: mol_type = other RNA
tcctggggctggatgcacac

SEQ ID NO: 1657 - RNA, 20 nt, synthetic construct
  source 1..20: mol_type = other RNA
acctgtgtgcatccagcccc

SEQ ID NO: 1658 - RNA, 20 nt, synthetic construct
  source 1..20: mol_type = other RNA
cactggaactttcctggggc

SEQ ID NO: 1659 - RNA, 20 nt, synthetic construct
  source 1..20: mol_type = other RNA
gactcactggaactttcctg

SEQ ID NO: 1660 - RNA, 20 nt, synthetic construct
  source 1..20: mol_type = other RNA
ggactcactggaactttcct

SEQ ID NO: 1661 - RNA, 20 nt, synthetic construct
  source 1..20: mol_type = other RNA
gggactcactggaactttcc

SEQ ID NO: 1662 - RNA, 20 nt, synthetic construct
  source 1..20: mol_type = other RNA
ctttgactcttgggactcac

SEQ ID NO: 1663 - RNA, 20 nt, synthetic construct
  source 1..20: mol_type = other RNA
gggcaaggactttgactctt

SEQ ID NO: 1664 - RNA, 20 nt, synthetic construct
  source 1..20: mol_type = other RNA
agggcaaggactttgactct

SEQ ID NO: 1665 - RNA, 20 nt, synthetic construct
  source 1..20: mol_type = other RNA
aagagtcaaagtccttgccc

SEQ ID NO: 1666 - RNA, 20 nt, synthetic construct
  source 1..20: mol_type = other RNA
acctgagttcctccagggca

SEQ ID NO: 1667 - RNA, 20 nt, synthetic construct
  source 1..20: mol_type = other RNA
agtcaaagtccttgccctgg

SEQ ID NO: 1668 - RNA, 20 nt, synthetic construct
  source 1..20: mol_type = other RNA
gaggcacctgagttcctcca

SEQ ID NO: 1669 - RNA, 20 nt, synthetic construct
  source 1..20: mol_type = other RNA
tgaggcacctgagttcctcc

SEQ ID NO: 1670 - RNA, 20 nt, synthetic construct
  source 1..20: mol_type = other RNA
tccttgccctggaggaactc

SEQ ID NO: 1671 - RNA, 20 nt, synthetic construct
  source 1..20: mol_type = other RNA
gaggaactcaggtgcctcag

SEQ ID NO: 1672 - RNA, 20 nt, synthetic construct
  source 1..20: mol_type = other RNA
aggaactcaggtgcctcagt

SEQ ID NO: 1673 - RNA, 20 nt, synthetic construct
  source 1..20: mol_type = other RNA
tttgctttaacttcccactg

SEQ ID NO: 1674 - RNA, 20 nt, synthetic construct
  source 1..20: mol_type = other RNA
ggaagttaaagcaaacattt

SEQ ID NO: 1675 - RNA, 20 nt, synthetic construct
  source 1..20: mol_type = other RNA
gcaaacatttaggcagtccc

SEQ ID NO: 1676 - RNA, 20 nt, synthetic construct
  source 1..20: mol_type = other RNA
ttgtgacccactgttgacca

SEQ ID NO: 1677 - RNA, 20 nt, synthetic construct
  source 1..20: mol_type = other RNA
gttgtgacccactgttgacc

SEQ ID NO: 1678 - RNA, 20 nt, synthetic construct
  source 1..20: mol_type = other RNA
aggcagtccctggtcaacag

SEQ ID NO: 1679 - RNA, 20 nt, synthetic construct
  source 1..20: mol_type = other RNA
ggcagtccctggtcaacagt

SEQ ID NO: 1680 - RNA, 20 nt, synthetic construct
  source 1..20: mol_type = other RNA
atctgaacaacatctatcag

SEQ ID NO: 1681 - RNA, 20 nt, synthetic construct
  source 1..20: mol_type = other RNA
catctatcagaggccaaaga

SEQ ID NO: 1682 - RNA, 20 nt, synthetic construct
  source 1..20: mol_type = other RNA
atctatcagaggccaaagaa

SEQ ID NO: 1683 - RNA, 20 nt, synthetic construct
  source 1..20: mol_type = other RNA
tctatcagaggccaaagaag

SEQ ID NO: 1684 - RNA, 20 nt, synthetic construct
  source 1..20: mol_type = other RNA
catcctagctcccccttctt

SEQ ID NO: 1685 - RNA, 20 nt, synthetic construct
  source 1..20: mol_type = other RNA
ctatcagaggccaaagaagg

SEQ ID NO: 1686 - RNA, 20 nt, synthetic construct
  source 1..20: mol_type = other RNA
aggccaaagaagggggagct

SEQ ID NO: 1687 - RNA, 20 nt, synthetic construct
  source 1..20: mol_type = other RNA
caaagaagggggagctagga

SEQ ID NO: 1688 - RNA, 20 nt, synthetic construct
  source 1..20: mol_type = other RNA
aaagaagggggagctaggat

SEQ ID NO: 1689 - RNA, 20 nt, synthetic construct
  source 1..20: mol_type = other RNA
ggagctaggatgggtgatga

SEQ ID NO: 1690 - RNA, 20 nt, synthetic construct
  source 1..20: mol_type = other RNA
gtgatgatggaaaaagaacc

SEQ ID NO: 1691 - RNA, 20 nt, synthetic construct
  source 1..20: mol_type = other RNA
tgatggaaaaagaaccaggc

SEQ ID NO: 1692 - RNA, 20 nt, synthetic construct
  source 1..20: mol_type = other RNA
tggaaaaagaaccaggctgg

SEQ ID NO: 1693 - RNA, 20 nt, synthetic construct
  source 1..20: mol_type = other RNA
cagctgtccagcctccagcc

SEQ ID NO: 1694 - RNA, 20 nt, synthetic construct
  source 1..20: mol_type = other RNA
aaaagaaccaggctggaggc

SEQ ID NO: 1695 - RNA, 20 nt, synthetic construct
  source 1..20: mol_type = other RNA
caggctggaggctggacagc

SEQ ID NO: 1696 - RNA, 20 nt, synthetic construct
  source 1..20: mol_type = other RNA
gctggacagctggacagctc

SEQ ID NO: 1697 - RNA, 20 nt, synthetic construct
  source 1..20: mol_type = other RNA
ggtacgtaaggagcagaaca

SEQ ID NO: 1698 - RNA, 20 nt, synthetic construct
  source 1..20: mol_type = other RNA
ccaaggtcacatggtacgta

SEQ ID NO: 1699 - RNA, 20 nt, synthetic construct
  source 1..20: mol_type = other RNA
gtcatgtggccaaggtcaca

SEQ ID NO: 1700 - RNA, 20 nt, synthetic construct
  source 1..20: mol_type = other RNA
ccttacgtaccatgtgacct

SEQ ID NO: 1701 - RNA, 20 nt, synthetic construct
  source 1..20: mol_type = other RNA
gtggtctagtcatgtggcca

SEQ ID NO: 1702 - RNA, 20 nt, synthetic construct
  source 1..20: mol_type = other RNA
ttccgagtggtctagtcatg

SEQ ID NO: 1703 - RNA, 20 nt, synthetic construct
  source 1..20: mol_type = other RNA
ggccacatgactagaccact

SEQ ID NO: 1704 - RNA, 20 nt, synthetic construct
  source 1..20: mol_type = other RNA
gaagaaactgagattccgag

SEQ ID NO: 1705 - RNA, 20 nt, synthetic construct
  source 1..20: mol_type = other RNA
cagtttcttcatctctgaaa

SEQ ID NO: 1706 - RNA, 20 nt, synthetic construct
  source 1..20: mol_type = other RNA
agtttcttcatctctgaaat

SEQ ID NO: 1707 - RNA, 20 nt, synthetic construct
  source 1..20: mol_type = other RNA
agcaatgatacgaatctccc

SEQ ID NO: 1708 - RNA, 20 nt, synthetic construct
  source 1..20: mol_type = other RNA
gcaatgatacgaatctccca

SEQ ID NO: 1709 - RNA, 20 nt, synthetic construct
  source 1..20: mol_type = other RNA
ttaaccctcactagagccct

SEQ ID NO: 1710 - RNA, 20 nt, synthetic construct
  source 1..20: mol_type = other RNA
tttaaccctcactagagccc

SEQ ID NO: 1711 - RNA, 20 nt, synthetic construct
  source 1..20: mol_type = other RNA
aatctcccagggctctagtg

SEQ ID NO: 1712 - RNA, 20 nt, synthetic construct
  source 1..20: mol_type = other RNA
atctcccagggctctagtga

SEQ ID NO: 1713 - RNA, 20 nt, synthetic construct
  source 1..20: mol_type = other RNA
ctagtgagggttaaatgaga

SEQ ID NO: 1714 - RNA, 20 nt, synthetic construct
  source 1..20: mol_type = other RNA
tgagggttaaatgagatggt

SEQ ID NO: 1715 - RNA, 20 nt, synthetic construct
  source 1..20: mol_type = other RNA
tggtaggtagaaaccttcca

SEQ ID NO: 1716 - RNA, 20 nt, synthetic construct
  source 1..20: mol_type = other RNA
atgccaagcactgccttgga

SEQ ID NO: 1717 - RNA, 20 nt, synthetic construct
  source 1..20: mol_type = other RNA
cctaatgccaagcactgcct

SEQ ID NO: 1718 - RNA, 20 nt, synthetic construct
  source 1..20: mol_type = other RNA
aaaccttccaaggcagtgct

SEQ ID NO: 1719 - RNA, 20 nt, synthetic construct
  source 1..20: mol_type = other RNA
ccaaggcagtgcttggcatt

SEQ ID NO: 1720 - RNA, 20 nt, synthetic construct
  source 1..20: mol_type = other RNA
ccttgctgttagactcagag

SEQ ID NO: 1721 - RNA, 20 nt, synthetic construct
  source 1..20: mol_type = other RNA
ccactctgagtctaacagca

SEQ ID NO: 1722 - RNA, 20 nt, synthetic construct
  source 1..20: mol_type = other RNA
gagtctaacagcaaggagaa

SEQ ID NO: 1723 - RNA, 20 nt, synthetic construct
  source 1..20: mol_type = other RNA
aacagcaaggagaatggaac

SEQ ID NO: 1724 - RNA, 20 nt, synthetic construct
  source 1..20: mol_type = other RNA
gaacaggaagaagataaacc

SEQ ID NO: 1725 - RNA, 20 nt, synthetic construct
  source 1..20: mol_type = other RNA
aacaggaagaagataaacca

SEQ ID NO: 1726 - RNA, 20 nt, synthetic construct
  source 1..20: mol_type = other RNA
acaggaagaagataaaccag

SEQ ID NO: 1727 - RNA, 20 nt, synthetic construct
  source 1..20: mol_type = other RNA
ttcttggtgcctcaaacccc

SEQ ID NO: 1728 - RNA, 20 nt, synthetic construct
  source 1..20: mol_type = other RNA
gaagataaaccaggggtttg

SEQ ID NO: 1729 - RNA, 20 nt, synthetic construct
  source 1..20: mol_type = other RNA
actgcagtaattatttttct

SEQ ID NO: 1730 - RNA, 20 nt, synthetic construct
  source 1..20: mol_type = other RNA
gaaaaataattactgcagtc

SEQ ID NO: 1731 - RNA, 20 nt, synthetic construct
  source 1..20: mol_type = other RNA
aaaaataattactgcagtct

SEQ ID NO: 1732 - RNA, 20 nt, synthetic construct
  source 1..20: mol_type = other RNA
aaaataattactgcagtctg

SEQ ID NO: 1733 - RNA, 20 nt, synthetic construct
  source 1..20: mol_type = other RNA
aaataattactgcagtctgg

SEQ ID NO: 1734 - RNA, 20 nt, synthetic construct
  source 1..20: mol_type = other RNA
aggtgtctagatattgtctg

SEQ ID NO: 1735 - RNA, 20 nt, synthetic construct
  source 1..20: mol_type = other RNA
taggtgtctagatattgtct

SEQ ID NO: 1736 - RNA, 20 nt, synthetic construct
  source 1..20: mol_type = other RNA
gtaggtgtctagatattgtc

SEQ ID NO: 1737 - RNA, 20 nt, synthetic construct
  source 1..20: mol_type = other RNA
cactgcattttgcatggggt

SEQ ID NO: 1738 - RNA, 20 nt, synthetic construct
  source 1..20: mol_type = other RNA
tcagcactgcattttgcatg

SEQ ID NO: 1739 - RNA, 20 nt, synthetic construct
  source 1..20: mol_type = other RNA
ctcagcactgcattttgcat

SEQ ID NO: 1740 - RNA, 20 nt, synthetic construct
  source 1..20: mol_type = other RNA
actcagcactgcattttgca

SEQ ID NO: 1741 - RNA, 20 nt, synthetic construct
  source 1..20: mol_type = other RNA
aaaatgcagtgctgagtgct

SEQ ID NO: 1742 - RNA, 20 nt, synthetic construct
  source 1..20: mol_type = other RNA
aaatgcagtgctgagtgctt

SEQ ID NO: 1743 - RNA, 20 nt, synthetic construct
  source 1..20: mol_type = other RNA
ccagttcaactcgagggcag

SEQ ID NO: 1744 - RNA, 20 nt, synthetic construct
  source 1..20: mol_type = other RNA
gccagttcaactcgagggca

SEQ ID NO: 1745 - RNA, 20 nt, synthetic construct
  source 1..20: mol_type = other RNA
tgccagttcaactcgagggc

SEQ ID NO: 1746 - RNA, 20 nt, synthetic construct
  source 1..20: mol_type = other RNA
catgtgccagttcaactcga

SEQ ID NO: 1747 - RNA, 20 nt, synthetic construct
  source 1..20: mol_type = other RNA
ccatgtgccagttcaactcg

SEQ ID NO: 1748 - RNA, 20 nt, synthetic construct
  source 1..20: mol_type = other RNA
cccctgccctcgagttgaac

SEQ ID NO: 1749 - RNA, 20 nt, synthetic construct
  source 1..20: mol_type = other RNA
cctcgagttgaactggcaca

SEQ ID NO: 1750 - RNA, 20 nt, synthetic construct
  source 1..20: mol_type = other RNA
ctcgagttgaactggcacat

SEQ ID NO: 1751 - RNA, 20 nt, synthetic construct
  source 1..20: mol_type = other RNA
actcaggctgtctgaggaca

SEQ ID NO: 1752 - RNA, 20 nt, synthetic construct
  source 1..20: mol_type = other RNA
acaggcactcaggctgtctg

SEQ ID NO: 1753 - RNA, 20 nt, synthetic construct
  source 1..20: mol_type = other RNA
ggaaggcaggacaggcactc

SEQ ID NO: 1754 - RNA, 20 nt, synthetic construct
  source 1..20: mol_type = other RNA
tggaattgggaaggcaggac

SEQ ID NO: 1755 - RNA, 20 nt, synthetic construct
  source 1..20: mol_type = other RNA
cctcttggaattgggaaggc

SEQ ID NO: 1756 - RNA, 20 nt, synthetic construct
  source 1..20: mol_type = other RNA
catacctcttggaattggga

SEQ ID NO: 1757 - RNA, 20 nt, synthetic construct
  source 1..20: mol_type = other RNA
aagtcatacctcttggaatt

SEQ ID NO: 1758 - RNA, 20 nt, synthetic construct
  source 1..20: mol_type = other RNA
aaagtcatacctcttggaat

SEQ ID NO: 1759 - RNA, 20 nt, synthetic construct
  source 1..20: mol_type = other RNA
cctgccttcccaattccaag

SEQ ID NO: 1760 - RNA, 20 nt, synthetic construct
  source 1..20: mol_type = other RNA
gtgctcaaagtcatacctct

SEQ ID NO: 1761 - RNA, 20 nt, synthetic construct
  source 1..20: mol_type = other RNA
gtatgactttgagcacttcc

SEQ ID NO: 1762 - RNA, 20 nt, synthetic construct
  source 1..20: mol_type = other RNA
tatgactttgagcacttccc

SEQ ID NO: 1763 - RNA, 20 nt, synthetic construct
  source 1..20: mol_type = other RNA
gaaactgaggcggggcgccc

SEQ ID NO: 1764 - RNA, 20 nt, synthetic construct
  source 1..20: mol_type = other RNA
ggaaactgaggcggggcgcc

SEQ ID NO: 1765 - RNA, 20 nt, synthetic construct
  source 1..20: mol_type = other RNA
tagatggggaaactgaggcg

SEQ ID NO: 1766 - RNA, 20 nt, synthetic construct
  source 1..20: mol_type = other RNA
atagatggggaaactgaggc

SEQ ID NO: 1767 - RNA, 20 nt, synthetic construct
  source 1..20: mol_type = other RNA
tatagatggggaaactgagg

SEQ ID NO: 1768 - RNA, 20 nt, synthetic construct
  source 1..20: mol_type = other RNA
ctttatagatggggaaactg

SEQ ID NO: 1769 - RNA, 20 nt, synthetic construct
  source 1..20: mol_type = other RNA
tcatctccactttatagatg

SEQ ID NO: 1770 - RNA, 20 nt, synthetic construct
  source 1..20: mol_type = other RNA
atcatctccactttatagat

SEQ ID NO: 1771 - RNA, 20 nt, synthetic construct
  source 1..20: mol_type = other RNA
tatcatctccactttataga

SEQ ID NO: 1772 - RNA, 20 nt, synthetic construct
  source 1..20: mol_type = other RNA
cagtttccccatctataaag

SEQ ID NO: 1773 - RNA, 20 nt, synthetic construct
  source 1..20: mol_type = other RNA
cattcagagtcactgatcta

SEQ ID NO: 1774 - RNA, 20 nt, synthetic construct
  source 1..20: mol_type = other RNA
attcagagtcactgatctaa

SEQ ID NO: 1775 - RNA, 20 nt, synthetic construct
  source 1..20: mol_type = other RNA
agtcactgatctaagggctc

SEQ ID NO: 1776 - RNA, 20 nt, synthetic construct
  source 1..20: mol_type = other RNA
gtcactgatctaagggctca

SEQ ID NO: 1777 - RNA, 20 nt, synthetic construct
  source 1..20: mol_type = other RNA
tgtatggggcttacactgaa

SEQ ID NO: 1778 - RNA, 20 nt, synthetic construct
  source 1..20: mol_type = other RNA
cctcttgcagggagtgtatg

SEQ ID NO: 1779 - RNA, 20 nt, synthetic construct
  source 1..20: mol_type = other RNA
tcctcttgcagggagtgtat

SEQ ID NO: 1780 - RNA, 20 nt, synthetic construct
  source 1..20: mol_type = other RNA
ttcctcttgcagggagtgta

SEQ ID NO: 1781 - RNA, 20 nt, synthetic construct
  source 1..20: mol_type = other RNA
ccccatacactccctgcaag

SEQ ID NO: 1782 - RNA, 20 nt, synthetic construct
  source 1..20: mol_type = other RNA
agaaccagcttcctcttgca

SEQ ID NO: 1783 - RNA, 20 nt, synthetic construct
  source 1..20: mol_type = other RNA
cagaaccagcttcctcttgc

SEQ ID NO: 1784 - RNA, 20 nt, synthetic construct
  source 1..20: mol_type = other RNA
cactccctgcaagaggaagc

SEQ ID NO: 1785 - RNA, 20 nt, synthetic construct
  source 1..20: mol_type = other RNA
ctggttctgactcagccttg

SEQ ID NO: 1786 - RNA, 20 nt, synthetic construct
  source 1..20: mol_type = other RNA
ttctgactcagccttgaggc

SEQ ID NO: 1787 - RNA, 20 nt, synthetic construct
  source 1..20: mol_type = other RNA
tgcctcagacgccagcctca

SEQ ID NO: 1788 - RNA, 20 nt, synthetic construct
  source 1..20: mol_type = other RNA
agccttgaggctggcgtctg

SEQ ID NO: 1789 - RNA, 20 nt, synthetic construct
  source 1..20: mol_type = other RNA
caccatgcacgttgggcttg

SEQ ID NO: 1790 - RNA, 20 nt, synthetic construct
  source 1..20: mol_type = other RNA
atctttccaccatgcacgtt

SEQ ID NO: 1791 - RNA, 20 nt, synthetic construct
  source 1..20: mol_type = other RNA
catctttccaccatgcacgt

SEQ ID NO: 1792 - RNA, 20 nt, synthetic construct
  source 1..20: mol_type = other RNA
aaccacaagcccaacgtgca

SEQ ID NO: 1793 - RNA, 20 nt, synthetic construct
  source 1..20: mol_type = other RNA
cacaagcccaacgtgcatgg

SEQ ID NO: 1794 - RNA, 20 nt, synthetic construct
  source 1..20: mol_type = other RNA
ggtggaaagatgactgtaag

SEQ ID NO: 1795 - RNA, 20 nt, synthetic construct
  source 1..20: mol_type = other RNA
gtggaaagatgactgtaagt

SEQ ID NO: 1796 - RNA, 20 nt, synthetic construct
  source 1..20: mol_type = other RNA
tggaaagatgactgtaagtg

SEQ ID NO: 1797 - RNA, 20 nt, synthetic construct
  source 1..20: mol_type = other RNA
ggaaagatgactgtaagtgg

SEQ ID NO: 1798 - RNA, 20 nt, synthetic construct
  source 1..20: mol_type = other RNA
taagtgggggcaacctcagc

SEQ ID NO: 1799 - RNA, 20 nt, synthetic construct
  source 1..20: mol_type = other RNA
gtcaaacccaaggccagctg

SEQ ID NO: 1800 - RNA, 20 nt, synthetic construct
  source 1..20: mol_type = other RNA
ggggcaacctcagctggcct

SEQ ID NO: 1801 - RNA, 20 nt, synthetic construct
  source 1..20: mol_type = other RNA
gggcaacctcagctggcctt

SEQ ID NO: 1802 - RNA, 20 nt, synthetic construct
  source 1..20: mol_type = other RNA
gcattccatggtcaaaccca

SEQ ID NO: 1803 - RNA, 20 nt, synthetic construct
  source 1..20: mol_type = other RNA
gctggccttgggtttgacca

SEQ ID NO: 1804 - RNA, 20 nt, synthetic construct
  source 1..20: mol_type = other RNA
cctttgtgcctcgcattcca

SEQ ID NO: 1805 - RNA, 20 nt, synthetic construct
  source 1..20: mol_type = other RNA
gggtttgaccatggaatgcg

SEQ ID NO: 1806 - RNA, 20 nt, synthetic construct
  source 1..20: mol_type = other RNA
ccatggaatgcgaggcacaa

SEQ ID NO: 1807 - RNA, 20 nt, synthetic construct
  source 1..20: mol_type = other RNA
catggaatgcgaggcacaaa

SEQ ID NO: 1808 - RNA, 20 nt, synthetic construct
  source 1..20: mol_type = other RNA
atggaatgcgaggcacaaag

SEQ ID NO: 1809 - RNA, 20 nt, synthetic construct
  source 1..20: mol_type = other RNA
tctgagaaagtatgcaaaat

SEQ ID NO: 1810 - RNA, 20 nt, synthetic construct
  source 1..20: mol_type = other RNA
ctctgagaaagtatgcaaaa

SEQ ID NO: 1811 - RNA, 20 nt, synthetic construct
  source 1..20: mol_type = other RNA
cattttgcatactttctcag

SEQ ID NO: 1812 - RNA, 20 nt, synthetic construct
  source 1..20: mol_type = other RNA
catactttctcagaggctgt

SEQ ID NO: 1813 - RNA, 20 nt, synthetic construct
  source 1..20: mol_type = other RNA
atactttctcagaggctgta

SEQ ID NO: 1814 - RNA, 20 nt, synthetic construct
  source 1..20: mol_type = other RNA
ggctgtagggcacccctgcc

SEQ ID NO: 1815 - RNA, 20 nt, synthetic construct
  source 1..20: mol_type = other RNA
gctgtagggcacccctgcca

SEQ ID NO: 1816 - RNA, 20 nt, synthetic construct
  source 1..20: mol_type = other RNA
aaaatgtaagaccctggcag

SEQ ID NO: 1817 - RNA, 20 nt, synthetic construct
  source 1..20: mol_type = other RNA
taaaatgtaagaccctggca

SEQ ID NO: 1818 - RNA, 20 nt, synthetic construct
  source 1..20: mol_type = other RNA
ataaaatgtaagaccctggc

SEQ ID NO: 1819 - RNA, 20 nt, synthetic construct
  source 1..20: mol_type = other RNA
atcaataaaatgtaagaccc

SEQ ID NO: 1820 - RNA, 20 nt, synthetic construct
  source 1..20: mol_type = other RNA
aaccaacaaagtagagtcag

SEQ ID NO: 1821 - RNA, 20 nt, synthetic construct
  source 1..20: mol_type = other RNA
ttcctctgactctactttgt

SEQ ID NO: 1822 - RNA, 20 nt, synthetic construct
  source 1..20: mol_type = other RNA
gcgtgacatttttgcccatg

SEQ ID NO: 1823 - RNA, 20 nt, synthetic construct
  source 1..20: mol_type = other RNA
tcctagaactgagacctcat

SEQ ID NO: 1824 - RNA, 20 nt, synthetic construct
  source 1..20: mol_type = other RNA
ttcctagaactgagacctca

SEQ ID NO: 1825 - RNA, 20 nt, synthetic construct
  source 1..20: mol_type = other RNA
gcccatgaggtctcagttct

SEQ ID NO: 1826 - RNA, 20 nt, synthetic construct
  source 1..20: mol_type = other RNA
ttctaggaatgacagaacaa

SEQ ID NO: 1827 - RNA, 20 nt, synthetic construct
  source 1..20: mol_type = other RNA
gacagaacaaaggctccctc

SEQ ID NO: 1828 - RNA, 20 nt, synthetic construct
  source 1..20: mol_type = other RNA
acagaacaaaggctccctct

SEQ ID NO: 1829 - RNA, 20 nt, synthetic construct
  source 1..20: mol_type = other RNA
aaatcaggcgacttcccaga

SEQ ID NO: 1830 - RNA, 20 nt, synthetic construct
  source 1..20: mol_type = other RNA
taaatcaggcgacttcccag

SEQ ID NO: 1831 - RNA, 20 nt, synthetic construct
  source 1..20: mol_type = other RNA
tcctccctttccaataaatc

SEQ ID NO: 1832 - RNA, 20 nt, synthetic construct
  source 1..20: mol_type = other RNA
tgggaagtcgcctgatttat

SEQ ID NO: 1833 - RNA, 20 nt, synthetic construct
  source 1..20: mol_type = other RNA
agtcgcctgatttattggaa

SEQ ID NO: 1834 - RNA, 20 nt, synthetic construct
  source 1..20: mol_type = other RNA
gtcgcctgatttattggaaa

SEQ ID NO: 1835 - RNA, 20 nt, synthetic construct
  source 1..20: mol_type = other RNA
gcctgatttattggaaaggg

SEQ ID NO: 1836 - RNA, 20 nt, synthetic construct
  source 1..20: mol_type = other RNA
cttagcgatccctaagggtg

SEQ ID NO: 1837 - RNA, 20 nt, synthetic construct
  source 1..20: mol_type = other RNA
gggaggaacaccccaccctt

SEQ ID NO: 1838 - RNA, 20 nt, synthetic construct
  source 1..20: mol_type = other RNA
gcttagcgatccctaagggt

SEQ ID NO: 1839 - RNA, 20 nt, synthetic construct
  source 1..20: mol_type = other RNA
ggaggaacaccccaccctta

SEQ ID NO: 1840 - RNA, 20 nt, synthetic construct
  source 1..20: mol_type = other RNA
agcttagcgatccctaaggg

SEQ ID NO: 1841 - RNA, 20 nt, synthetic construct
  source 1..20: mol_type = other RNA
gggagcttagcgatccctaa

SEQ ID NO: 1842 - RNA, 20 nt, synthetic construct
  source 1..20: mol_type = other RNA
agggagcttagcgatcccta

SEQ ID NO: 1843 - RNA, 20 nt, synthetic construct
  source 1..20: mol_type = other RNA
ggggaaggaagctggaggaa

SEQ ID NO: 1844 - RNA, 20 nt, synthetic construct
  source 1..20: mol_type = other RNA
tggggaaggaagctggagga

SEQ ID NO: 1845 - RNA, 20 nt, synthetic construct
  source 1..20: mol_type = other RNA
cagatggggaaggaagctgg

SEQ ID NO: 1846 - RNA, 20 nt, synthetic construct
  source 1..20: mol_type = other RNA
ggccagatggggaaggaagc

SEQ ID NO: 1847 - RNA, 20 nt, synthetic construct
  source 1..20: mol_type = other RNA
tcctaagggccagatgggga

SEQ ID NO: 1848 - RNA, 20 nt, synthetic construct
  source 1..20: mol_type = other RNA
ctccagcttccttccccatc

SEQ ID NO: 1849 - RNA, 20 nt, synthetic construct
  source 1..20: mol_type = other RNA
cacatcctaagggccagatg

SEQ ID NO: 1850 - RNA, 20 nt, synthetic construct
  source 1..20: mol_type = other RNA
tcacatcctaagggccagat

SEQ ID NO: 1851 - RNA, 20 nt, synthetic construct
  source 1..20: mol_type = other RNA
ctcacatcctaagggccaga

SEQ ID NO: 1852 - RNA, 20 nt, synthetic construct
  source 1..20: mol_type = other RNA
tccttccccatctggccctt

SEQ ID NO: 1853 - RNA, 20 nt, synthetic construct
  source 1..20: mol_type = other RNA
tctggtttctcacatcctaa

SEQ ID NO: 1854 - RNA, 20 nt, synthetic construct
  source 1..20: mol_type = other RNA
ctctggtttctcacatccta

SEQ ID NO: 1855 - RNA, 20 nt, synthetic construct
  source 1..20: mol_type = other RNA
tctctggtgtgtcacagctc

SEQ ID NO: 1856 - RNA, 20 nt, synthetic construct
  source 1..20: mol_type = other RNA
agagctgtgacacaccagag

SEQ ID NO: 1857 - RNA, 20 nt, synthetic construct
  source 1..20: mol_type = other RNA
ggcacagcctctctcctctc

SEQ ID NO: 1858 - RNA, 20 nt, synthetic construct
  source 1..20: mol_type = other RNA
tgacacaccagagaggagag

SEQ ID NO: 1859 - RNA, 20 nt, synthetic construct
  source 1..20: mol_type = other RNA
aggaagcccagaaggtgaga

SEQ ID NO: 1860 - RNA, 20 nt, synthetic construct
  source 1..20: mol_type = other RNA
aaggaagcccagaaggtgag

SEQ ID NO: 1861 - RNA, 20 nt, synthetic construct
  source 1..20: mol_type = other RNA
ggctgtgccctctcaccttc

SEQ ID NO: 1862 - RNA, 20 nt, synthetic construct
  source 1..20: mol_type = other RNA
gctgtgccctctcaccttct

SEQ ID NO: 1863 - RNA, 20 nt, synthetic construct
  source 1..20: mol_type = other RNA
ctcaggaaaggaagcccaga

SEQ ID NO: 1864 - RNA, 20 nt, synthetic construct
  source 1..20: mol_type = other RNA
caggggctggttctcaggaa

SEQ ID NO: 1865 - RNA, 20 nt, synthetic construct
  source 1..20: mol_type = other RNA
cagaacaggggctggttctc

SEQ ID NO: 1866 - RNA, 20 nt, synthetic construct
  source 1..20: mol_type = other RNA
cccaaaatcagaacaggggc

SEQ ID NO: 1867 - RNA, 20 nt, synthetic construct
  source 1..20: mol_type = other RNA
gactcccaaaatcagaacag

SEQ ID NO: 1868 - RNA, 20 nt, synthetic construct
  source 1..20: mol_type = other RNA
agactcccaaaatcagaaca

SEQ ID NO: 1869 - RNA, 20 nt, synthetic construct
  source 1..20: mol_type = other RNA
gagactcccaaaatcagaac

SEQ ID NO: 1870 - RNA, 20 nt, synthetic construct
  source 1..20: mol_type = other RNA
accagcccctgttctgattt

SEQ ID NO: 1871 - RNA, 20 nt, synthetic construct
  source 1..20: mol_type = other RNA
ccagcccctgttctgatttt

SEQ ID NO: 1872 - RNA, 20 nt, synthetic construct
  source 1..20: mol_type = other RNA
catccccctccctgaggcaa

SEQ ID NO: 1873 - RNA, 20 nt, synthetic construct
  source 1..20: mol_type = other RNA
ttgggagtctcctttgcctc

SEQ ID NO: 1874 - RNA, 20 nt, synthetic construct
  source 1..20: mol_type = other RNA
tgggagtctcctttgcctca

SEQ ID NO: 1875 - RNA, 20 nt, synthetic construct
  source 1..20: mol_type = other RNA
gagtctcctttgcctcaggg

SEQ ID NO: 1876 - RNA, 20 nt, synthetic construct
  source 1..20: mol_type = other RNA
agtctcctttgcctcaggga

SEQ ID NO: 1877 - RNA, 20 nt, synthetic construct
  source 1..20: mol_type = other RNA
ccaacacatccccctccctg

SEQ ID NO: 1878 - RNA, 20 nt, synthetic construct
  source 1..20: mol_type = other RNA
gtctcctttgcctcagggag

SEQ ID NO: 1879 - RNA, 20 nt, synthetic construct
  source 1..20: mol_type = other RNA
tctcctttgcctcagggagg

SEQ ID NO: 1880 - RNA, 20 nt, synthetic construct
  source 1..20: mol_type = other RNA
cctcagggagggggatgtgt

SEQ ID NO: 1881 - RNA, 20 nt, synthetic construct
  source 1..20: mol_type = other RNA
gggagggggatgtgttggcg

SEQ ID NO: 1882 - RNA, 20 nt, synthetic construct
  source 1..20: mol_type = other RNA
gagaagcagtccaagatgaa

SEQ ID NO: 1883 - RNA, 20 nt, synthetic construct
  source 1..20: mol_type = other RNA
aagactcgtgcctttcatct

SEQ ID NO: 1884 - RNA, 20 nt, synthetic construct
  source 1..20: mol_type = other RNA
ttcatcttggactgcttctc

SEQ ID NO: 1885 - RNA, 20 nt, synthetic construct
  source 1..20: mol_type = other RNA
tctgtggttcctggggtaga

SEQ ID NO: 1886 - RNA, 20 nt, synthetic construct
  source 1..20: mol_type = other RNA
ttctgtggttcctggggtag

SEQ ID NO: 1887 - RNA, 20 nt, synthetic construct
  source 1..20: mol_type = other RNA
cttctctggccctctacccc

SEQ ID NO: 1888 - RNA, 20 nt, synthetic construct
  source 1..20: mol_type = other RNA
gtctccttctgtggttcctg

SEQ ID NO: 1889 - RNA, 20 nt, synthetic construct
  source 1..20: mol_type = other RNA
tgtctccttctgtggttcct

SEQ ID NO: 1890 - RNA, 20 nt, synthetic construct
  source 1..20: mol_type = other RNA
gtgtctccttctgtggttcc

SEQ ID NO: 1891 - RNA, 20 nt, synthetic construct
  source 1..20: mol_type = other RNA
tctaccccaggaaccacaga

SEQ ID NO: 1892 - RNA, 20 nt, synthetic construct
  source 1..20: mol_type = other RNA
tacaggtgtgtctccttctg

SEQ ID NO: 1893 - RNA, 20 nt, synthetic construct
  source 1..20: mol_type = other RNA
gaaggagacacacctgtacc

SEQ ID NO: 1894 - RNA, 20 nt, synthetic construct
  source 1..20: mol_type = other RNA
aaatgccagcttccgggtac

SEQ ID NO: 1895 - RNA, 20 nt, synthetic construct
  source 1..20: mol_type = other RNA
acacacctgtacccggaagc

SEQ ID NO: 1896 - RNA, 20 nt, synthetic construct
  source 1..20: mol_type = other RNA
atggggaaatgccagcttcc

SEQ ID NO: 1897 - RNA, 20 nt, synthetic construct
  source 1..20: mol_type = other RNA
catggggaaatgccagcttc

SEQ ID NO: 1898 - RNA, 20 nt, synthetic construct
  source 1..20: mol_type = other RNA
cggaagctggcatttcccca

SEQ ID NO: 1899 - RNA, 20 nt, synthetic construct
  source 1..20: mol_type = other RNA
ggaagctggcatttccccat

SEQ ID NO: 1900 - RNA, 20 nt, synthetic construct
  source 1..20: mol_type = other RNA
ctggcctgggaaaacccatg

SEQ ID NO: 1901 - RNA, 20 nt, synthetic construct
  source 1..20: mol_type = other RNA
gctggcctgggaaaacccat

SEQ ID NO: 1902 - RNA, 20 nt, synthetic construct
  source 1..20: mol_type = other RNA
ggctggcctgggaaaaccca

SEQ ID NO: 1903 - RNA, 20 nt, synthetic construct
  source 1..20: mol_type = other RNA
atttccccatgggttttccc

SEQ ID NO: 1904 - RNA, 20 nt, synthetic construct
  source 1..20: mol_type = other RNA
tgtttggaacaggctggcct

SEQ ID NO: 1905 - RNA, 20 nt, synthetic construct
  source 1..20: mol_type = other RNA
gtgtttggaacaggctggcc

SEQ ID NO: 1906 - RNA, 20 nt, synthetic construct
  source 1..20: mol_type = other RNA
aagctgtgtttggaacaggc

SEQ ID NO: 1907 - RNA, 20 nt, synthetic construct
  source 1..20: mol_type = other RNA
gggcaagctgtgtttggaac

SEQ ID NO: 1908 - RNA, 20 nt, synthetic construct
  source 1..20: mol_type = other RNA
gcttgggggcaagctgtgtt

SEQ ID NO: 1909 - RNA, 20 nt, synthetic construct
  source 1..20: mol_type = other RNA
tggagaagtgccaggcttgg

SEQ ID NO: 1910 - RNA, 20 nt, synthetic construct
  source 1..20: mol_type = other RNA
acacagcttgcccccaagcc

SEQ ID NO: 1911 - RNA, 20 nt, synthetic construct
  source 1..20: mol_type = other RNA
ttggagaagtgccaggcttg

SEQ ID NO: 1912 - RNA, 20 nt, synthetic construct
  source 1..20: mol_type = other RNA
gttggagaagtgccaggctt

SEQ ID NO: 1913 - RNA, 20 nt, synthetic construct
  source 1..20: mol_type = other RNA
ggttggagaagtgccaggct

SEQ ID NO: 1914 - RNA, 20 nt, synthetic construct
  source 1..20: mol_type = other RNA
tgactggttggagaagtgcc

SEQ ID NO: 1915 - RNA, 20 nt, synthetic construct
  source 1..20: mol_type = other RNA
gaacagaaaccgtgactggt

SEQ ID NO: 1916 - RNA, 20 nt, synthetic construct
  source 1..20: mol_type = other RNA
ggcacttctccaaccagtca

SEQ ID NO: 1917 - RNA, 20 nt, synthetic construct
  source 1..20: mol_type = other RNA
cagagaacagaaaccgtgac

SEQ ID NO: 1918 - RNA, 20 nt, synthetic construct
  source 1..20: mol_type = other RNA
gaacgcaggtgaactgctca

SEQ ID NO: 1919 - RNA, 20 nt, synthetic construct
  source 1..20: mol_type = other RNA
aagtagacagtaaggaacgc

SEQ ID NO: 1920 - RNA, 20 nt, synthetic construct
  source 1..20: mol_type = other RNA
ggatgggaaagtagacagta

SEQ ID NO: 1921 - RNA, 20 nt, synthetic construct
  source 1..20: mol_type = other RNA
gggcaggcaggtaggtggat

SEQ ID NO: 1922 - RNA, 20 nt, synthetic construct
  source 1..20: mol_type = other RNA
agggcaggcaggtaggtgga

SEQ ID NO: 1923 - RNA, 20 nt, synthetic construct
  source 1..20: mol_type = other RNA
ttggagggcaggcaggtagg

SEQ ID NO: 1924 - RNA, 20 nt, synthetic construct
  source 1..20: mol_type = other RNA
aagttggagggcaggcaggt

SEQ ID NO: 1925 - RNA, 20 nt, synthetic construct
  source 1..20: mol_type = other RNA
aggaaagttggagggcaggc

SEQ ID NO: 1926 - RNA, 20 nt, synthetic construct
  source 1..20: mol_type = other RNA
gatcaggaaagttggagggc

SEQ ID NO: 1927 - RNA, 20 nt, synthetic construct
  source 1..20: mol_type = other RNA
cacagatcaggaaagttgga

SEQ ID NO: 1928 - RNA, 20 nt, synthetic construct
  source 1..20: mol_type = other RNA
acacagatcaggaaagttgg

SEQ ID NO: 1929 - RNA, 20 nt, synthetic construct
  source 1..20: mol_type = other RNA
ggtacacagatcaggaaagt

SEQ ID NO: 1930 - RNA, 20 nt, synthetic construct
  source 1..20: mol_type = other RNA
ggaaggtaggtacacagatc

SEQ ID NO: 1931 - RNA, 20 nt, synthetic construct
  source 1..20: mol_type = other RNA
agaagtagatataggaaggt

SEQ ID NO: 1932 - RNA, 20 nt, synthetic construct
  source 1..20: mol_type = other RNA
aaaaagaagtagatatagga

SEQ ID NO: 1933 - RNA, 20 nt, synthetic construct
  source 1..20: mol_type = other RNA
taataaaaagaagtagatat

SEQ ID NO: 1934 - RNA, 20 nt, synthetic construct
  source 1..20: mol_type = other RNA
aaaaaattaaaaaaaagaca

SEQ ID NO: 1935 - RNA, 20 nt, synthetic construct
  source 1..20: mol_type = other RNA
aaaaaaattaaaaaaaagac

SEQ ID NO: 1936 - RNA, 20 nt, synthetic construct
  source 1..20: mol_type = other RNA
gtcttttttttaattttttt

SEQ ID NO: 1937 - RNA, 20 nt, synthetic construct
  source 1..20: mol_type = other RNA
tttttttaattttttttggg

SEQ ID NO: 1938 - RNA, 20 nt, synthetic construct
  source 1..20: mol_type = other RNA
ttttttaattttttttgggt

SEQ ID NO: 1939 - RNA, 20 nt, synthetic construct
  source 1..20: mol_type = other RNA
tttttaattttttttgggtg

SEQ ID NO: 1940 - RNA, 20 nt, synthetic construct
  source 1..20: mol_type = other RNA
ttttaattttttttgggtgg

SEQ ID NO: 1941 - RNA, 20 nt, synthetic construct
  source 1..20: mol_type = other RNA
tttaattttttttgggtggg

SEQ ID NO: 1942 - RNA, 20 nt, synthetic construct
  source 1..20: mol_type = other RNA
ttaattttttttgggtgggg

SEQ ID NO: 1943 - RNA, 20 nt, synthetic construct
  source 1..20: mol_type = other RNA
acagtcttgctttgtagccc

SEQ ID NO: 1944 - RNA, 20 nt, synthetic construct
  source 1..20: mol_type = other RNA
tcttgctttgtagcccaggc

SEQ ID NO: 1945 - RNA, 20 nt, synthetic construct
  source 1..20: mol_type = other RNA
acgccactgcattccagcct

SEQ ID NO: 1946 - RNA, 20 nt, synthetic construct
  source 1..20: mol_type = other RNA
cacgccactgcattccagcc

SEQ ID NO: 1947 - RNA, 20 nt, synthetic construct
  source 1..20: mol_type = other RNA
tagcccaggctggaatgcag

SEQ ID NO: 1948 - RNA, 20 nt, synthetic construct
  source 1..20: mol_type = other RNA
tgcttgaatctgggaggcag

SEQ ID NO: 1949 - RNA, 20 nt, synthetic construct
  source 1..20: mol_type = other RNA
gagaattgcttgaatctggg

SEQ ID NO: 1950 - RNA, 20 nt, synthetic construct
  source 1..20: mol_type = other RNA
caggagaattgcttgaatct

SEQ ID NO: 1951 - RNA, 20 nt, synthetic construct
  source 1..20: mol_type = other RNA
gcaggagaattgcttgaatc

SEQ ID NO: 1952 - RNA, 20 nt, synthetic construct
  source 1..20: mol_type = other RNA
gctactcgggaggctgaggc

SEQ ID NO: 1953 - RNA, 20 nt, synthetic construct
  source 1..20: mol_type = other RNA
cctagctactcgggaggctg

SEQ ID NO: 1954 - RNA, 20 nt, synthetic construct
  source 1..20: mol_type = other RNA
tgtaatcctagctactcggg

SEQ ID NO: 1955 - RNA, 20 nt, synthetic construct
  source 1..20: mol_type = other RNA
gcctgtaatcctagctactc

SEQ ID NO: 1956 - RNA, 20 nt, synthetic construct
  source 1..20: mol_type = other RNA
cgcctgtaatcctagctact

SEQ ID NO: 1957 - RNA, 20 nt, synthetic construct
  source 1..20: mol_type = other RNA
cctcagcctcccgagtagct

SEQ ID NO: 1958 - RNA, 20 nt, synthetic construct
  source 1..20: mol_type = other RNA
tcccgagtagctaggattac

SEQ ID NO: 1959 - RNA, 20 nt, synthetic construct
  source 1..20: mol_type = other RNA
aattagctcggcatggtggc

SEQ ID NO: 1960 - RNA, 20 nt, synthetic construct
  source 1..20: mol_type = other RNA
taaaaattagctcggcatgg

SEQ ID NO: 1961 - RNA, 20 nt, synthetic construct
  source 1..20: mol_type = other RNA
atataaaaattagctcggca

SEQ ID NO: 1962 - RNA, 20 nt, synthetic construct
  source 1..20: mol_type = other RNA
taaaaatataaaaattagct

SEQ ID NO: 1963 - RNA, 20 nt, synthetic construct
  source 1..20: mol_type = other RNA
tttatatttttagtagagac

SEQ ID NO: 1964 - RNA, 20 nt, synthetic construct
  source 1..20: mol_type = other RNA
ttatatttttagtagagaca

SEQ ID NO: 1965 - RNA, 20 nt, synthetic construct
  source 1..20: mol_type = other RNA
gagacagggtttcatcatgt

SEQ ID NO: 1966 - RNA, 20 nt, synthetic construct
  source 1..20: mol_type = other RNA
agggtttcatcatgttggcc

SEQ ID NO: 1967 - RNA, 20 nt, synthetic construct
  source 1..20: mol_type = other RNA
tttcatcatgttggccaggc

SEQ ID NO: 1968 - RNA, 20 nt, synthetic construct
  source 1..20: mol_type = other RNA
tcaggagtttgagaccagcc

SEQ ID NO: 1969 - RNA, 20 nt, synthetic construct
  source 1..20: mol_type = other RNA
tgggtggattgcttgaggtc

SEQ ID NO: 1970 - RNA, 20 nt, synthetic construct
  source 1..20: mol_type = other RNA
tgagatgggtggattgcttg

SEQ ID NO: 1971 - RNA, 20 nt, synthetic construct
  source 1..20: mol_type = other RNA
ttttgggaagctgagatggg

SEQ ID NO: 1972 - RNA, 20 nt, synthetic construct
  source 1..20: mol_type = other RNA
gcattttgggaagctgagat

SEQ ID NO: 1973 - RNA, 20 nt, synthetic construct
  source 1..20: mol_type = other RNA
agcattttgggaagctgaga

SEQ ID NO: 1974 - RNA, 20 nt, synthetic construct
  source 1..20: mol_type = other RNA
gcctataatcccagcatttt

SEQ ID NO: 1975 - RNA, 20 nt, synthetic construct
  source 1..20: mol_type = other RNA
atctcagcttcccaaaatgc

SEQ ID NO: 1976 - RNA, 20 nt, synthetic construct
  source 1..20: mol_type = other RNA
cgcctataatcccagcattt

SEQ ID NO: 1977 - RNA, 20 nt, synthetic construct
  source 1..20: mol_type = other RNA
tctcagcttcccaaaatgct

SEQ ID NO: 1978 - RNA, 20 nt, synthetic construct
  source 1..20: mol_type = other RNA
tcccaaaatgctgggattat

SEQ ID NO: 1979 - RNA, 20 nt, synthetic construct
  source 1..20: mol_type = other RNA
gggcgagaggctgggcacag

SEQ ID NO: 1980 - RNA, 20 nt, synthetic construct
  source 1..20: mol_type = other RNA
ataagacagggcgagaggct

SEQ ID NO: 1981 - RNA, 20 nt, synthetic construct
  source 1..20: mol_type = other RNA
cataagacagggcgagaggc

SEQ ID NO: 1982 - RNA, 20 nt, synthetic construct
  source 1..20: mol_type = other RNA
ccaccataagacagggcgag

SEQ ID NO: 1983 - RNA, 20 nt, synthetic construct
  source 1..20: mol_type = other RNA
tagattaccaccataagaca

SEQ ID NO: 1984 - RNA, 20 nt, synthetic construct
  source 1..20: mol_type = other RNA
cagcctctcgccctgtctta

SEQ ID NO: 1985 - RNA, 20 nt, synthetic construct
  source 1..20: mol_type = other RNA
gtagattaccaccataagac

SEQ ID NO: 1986 - RNA, 20 nt, synthetic construct
  source 1..20: mol_type = other RNA
cctctcgccctgtcttatgg

SEQ ID NO: 1987 - RNA, 20 nt, synthetic construct
  source 1..20: mol_type = other RNA
tgattaggtaggtagagaaa

SEQ ID NO: 1988 - RNA, 20 nt, synthetic construct
  source 1..20: mol_type = other RNA
aaatatatgggtgattaggt

SEQ ID NO: 1989 - RNA, 20 nt, synthetic construct
  source 1..20: mol_type = other RNA
tgggaaatatatgggtgatt

SEQ ID NO: 1990 - RNA, 20 nt, synthetic construct
  source 1..20: mol_type = other RNA
taaatacatgggaaatatat

SEQ ID NO: 1991 - RNA, 20 nt, synthetic construct
  source 1..20: mol_type = other RNA
gtaaatacatgggaaatata

SEQ ID NO: 1992 - RNA, 20 nt, synthetic construct
  source 1..20: mol_type = other RNA
actttgacatgtaaatacat

SEQ ID NO: 1993 - RNA, 20 nt, synthetic construct
  source 1..20: mol_type = other RNA
tactttgacatgtaaataca

SEQ ID NO: 1994 - RNA, 20 nt, synthetic construct
  source 1..20: mol_type = other RNA
gcttagctggtaggaatgca

SEQ ID NO: 1995 - RNA, 20 nt, synthetic construct
  source 1..20: mol_type = other RNA
ggcttagctggtaggaatgc

SEQ ID NO: 1996 - RNA, 20 nt, synthetic construct
  source 1..20: mol_type = other RNA
gtaaagggggcttagctggt

SEQ ID NO: 1997 - RNA, 20 nt, synthetic construct
  source 1..20: mol_type = other RNA
tgttgtaaagggggcttagc

SEQ ID NO: 1998 - RNA, 20 nt, synthetic construct
  source 1..20: mol_type = other RNA
ctgatggattgttgtaaagg

SEQ ID NO: 1999 - RNA, 20 nt, synthetic construct
  source 1..20: mol_type = other RNA
gctgatggattgttgtaaag

SEQ ID NO: 2000 - RNA, 20 nt, synthetic construct
  source 1..20: mol_type = other RNA
tgctgatggattgttgtaaa

SEQ ID NO: 2001 - RNA, 20 nt, synthetic construct
  source 1..20: mol_type = other RNA
ctgctgatggattgttgtaa

SEQ ID NO: 2002 - RNA, 20 nt, synthetic construct
  source 1..20: mol_type = other RNA
ctttacaacaatccatcagc

SEQ ID NO: 2003 - RNA, 20 nt, synthetic construct
  source 1..20: mol_type = other RNA
tgagaacctggacctgctga

SEQ ID NO: 2004 - RNA, 20 nt, synthetic construct
  source 1..20: mol_type = other RNA
aacaatccatcagcaggtcc

SEQ ID NO: 2005 - RNA, 20 nt, synthetic construct
  source 1..20: mol_type = other RNA
tgggagggtgtatgagaacc

SEQ ID NO: 2006 - RNA, 20 nt, synthetic construct
  source 1..20: mol_type = other RNA
aattagggagggacatggga

SEQ ID NO: 2007 - RNA, 20 nt, synthetic construct
  source 1..20: mol_type = other RNA
aaattagggagggacatggg

SEQ ID NO: 2008 - RNA, 20 nt, synthetic construct
  source 1..20: mol_type = other RNA
tccaaattagggagggacat

SEQ ID NO: 2009 - RNA, 20 nt, synthetic construct
  source 1..20: mol_type = other RNA
atccaaattagggagggaca

SEQ ID NO: 2010 - RNA, 20 nt, synthetic construct
  source 1..20: mol_type = other RNA
ctatgtatccaaattaggga

SEQ ID NO: 2011 - RNA, 20 nt, synthetic construct
  source 1..20: mol_type = other RNA
gctatgtatccaaattaggg

SEQ ID NO: 2012 - RNA, 20 nt, synthetic construct
  source 1..20: mol_type = other RNA
tcccatgtccctccctaatt

SEQ ID NO: 2013 - RNA, 20 nt, synthetic construct
  source 1..20: mol_type = other RNA
actgctatgtatccaaatta

SEQ ID NO: 2014 - RNA, 20 nt, synthetic construct
  source 1..20: mol_type = other RNA
aactgctatgtatccaaatt

SEQ ID NO: 2015 - RNA, 20 nt, synthetic construct
  source 1..20: mol_type = other RNA
agatcggtgaatagggagat

SEQ ID NO: 2016 - RNA, 20 nt, synthetic construct
  source 1..20: mol_type = other RNA
gagaaagagatcggtgaata

SEQ ID NO: 2017 - RNA, 20 nt, synthetic construct
  source 1..20: mol_type = other RNA
agagaaagagatcggtgaat

SEQ ID NO: 2018 - RNA, 20 nt, synthetic construct
  source 1..20: mol_type = other RNA
agaaagggagagaaagagat

SEQ ID NO: 2019 - RNA, 20 nt, synthetic construct
  source 1..20: mol_type = other RNA
gaaagaaaggaggcaagaaa

SEQ ID NO: 2020 - RNA, 20 nt, synthetic construct
  source 1..20: mol_type = other RNA
ggaaagaaaggaggcaagaa

SEQ ID NO: 2021 - RNA, 20 nt, synthetic construct
  source 1..20: mol_type = other RNA
tcaggagaaggaaagaaagg

SEQ ID NO: 2022 - RNA, 20 nt, synthetic construct
  source 1..20: mol_type = other RNA
gattcaggagaaggaaagaa

SEQ ID NO: 2023 - RNA, 20 nt, synthetic construct
  source 1..20: mol_type = other RNA
taaataaatgattcaggaga

SEQ ID NO: 2024 - RNA, 20 nt, synthetic construct
  source 1..20: mol_type = other RNA
aggtgctaaataaatgattc

SEQ ID NO: 2025 - RNA, 20 nt, synthetic construct
  source 1..20: mol_type = other RNA
agtccaccataatttctagc

SEQ ID NO: 2026 - RNA, 20 nt, synthetic construct
  source 1..20: mol_type = other RNA
ttagcacctgctagaaatta

SEQ ID NO: 2027 - RNA, 20 nt, synthetic construct
  source 1..20: mol_type = other RNA
gcacctgctagaaattatgg

SEQ ID NO: 2028 - RNA, 20 nt, synthetic construct
  source 1..20: mol_type = other RNA
tggtgaaagagcactggatg

SEQ ID NO: 2029 - RNA, 20 nt, synthetic construct
  source 1..20: mol_type = other RNA
ttggtgaaagagcactggat

SEQ ID NO: 2030 - RNA, 20 nt, synthetic construct
  source 1..20: mol_type = other RNA
tttggtgaaagagcactgga

SEQ ID NO: 2031 - RNA, 20 nt, synthetic construct
  source 1..20: mol_type = other RNA
gctttttggtgaaagagcac

SEQ ID NO: 2032 - RNA, 20 nt, synthetic construct
  source 1..20: mol_type = other RNA
cttcttcatctcatgctttt

SEQ ID NO: 2033 - RNA, 20 nt, synthetic construct
  source 1..20: mol_type = other RNA
caaaaagcatgagatgaaga

SEQ ID NO: 2034 - RNA, 20 nt, synthetic construct
  source 1..20: mol_type = other RNA
agaaggacttttaacctagt

SEQ ID NO: 2035 - RNA, 20 nt, synthetic construct
  source 1..20: mol_type = other RNA
gaaggacttttaacctagta

SEQ ID NO: 2036 - RNA, 20 nt, synthetic construct
  source 1..20: mol_type = other RNA
aaggacttttaacctagtag

SEQ ID NO: 2037 - RNA, 20 nt, synthetic construct
  source 1..20: mol_type = other RNA
atgaagattcctcccctact

SEQ ID NO: 2038 - RNA, 20 nt, synthetic construct
  source 1..20: mol_type = other RNA
gacttttaacctagtagggg

SEQ ID NO: 2039 - RNA, 20 nt, synthetic construct
  source 1..20: mol_type = other RNA
gggaggaatcttcatccatt

SEQ ID NO: 2040 - RNA, 20 nt, synthetic construct
  source 1..20: mol_type = other RNA
aggcagcctccagttccaaa

SEQ ID NO: 2041 - RNA, 20 nt, synthetic construct
  source 1..20: mol_type = other RNA
aatcttcatccatttggaac

SEQ ID NO: 2042 - RNA, 20 nt, synthetic construct
  source 1..20: mol_type = other RNA
cttcatccatttggaactgg

SEQ ID NO: 2043 - RNA, 20 nt, synthetic construct
  source 1..20: mol_type = other RNA
gttttagatttgaatgatca

SEQ ID NO: 2044 - RNA, 20 nt, synthetic construct
  source 1..20: mol_type = other RNA
agaccatttgaaggaatgaa

SEQ ID NO: 2045 - RNA, 20 nt, synthetic construct
  source 1..20: mol_type = other RNA
actccattcattccttcaaa

SEQ ID NO: 2046 - RNA, 20 nt, synthetic construct
  source 1..20: mol_type = other RNA
actattctaagaccatttga

SEQ ID NO: 2047 - RNA, 20 nt, synthetic construct
  source 1..20: mol_type = other RNA
tttattttattttttgagac

SEQ ID NO: 2048 - RNA, 20 nt, synthetic construct
  source 1..20: mol_type = other RNA
ttattttattttttgagaca

SEQ ID NO: 2049 - RNA, 20 nt, synthetic construct
  source 1..20: mol_type = other RNA
agggtcttgctctgtcgcca

SEQ ID NO: 2050 - RNA, 20 nt, synthetic construct
  source 1..20: mol_type = other RNA
tcttgctctgtcgccaaggc

SEQ ID NO: 2051 - RNA, 20 nt, synthetic construct
  source 1..20: mol_type = other RNA
gcgccactgtgctccagcct

SEQ ID NO: 2052 - RNA, 20 nt, synthetic construct
  source 1..20: mol_type = other RNA
tcgccaaggctggagcacag

SEQ ID NO: 2053 - RNA, 20 nt, synthetic construct
  source 1..20: mol_type = other RNA
gtcttgagcccaggagattg

SEQ ID NO: 2054 - RNA, 20 nt, synthetic construct
  source 1..20: mol_type = other RNA
tcactacagcctcaatctcc

SEQ ID NO: 2055 - RNA, 20 nt, synthetic construct
  source 1..20: mol_type = other RNA
cactacagcctcaatctcct

SEQ ID NO: 2056 - RNA, 20 nt, synthetic construct
  source 1..20: mol_type = other RNA
tgggaggatgtcttgagccc

SEQ ID NO: 2057 - RNA, 20 nt, synthetic construct
  source 1..20: mol_type = other RNA
acttgggaggctgagatggg

SEQ ID NO: 2058 - RNA, 20 nt, synthetic construct
  source 1..20: mol_type = other RNA
gctacttgggaggctgagat

SEQ ID NO: 2059 - RNA, 20 nt, synthetic construct
  source 1..20: mol_type = other RNA
agctacttgggaggctgaga

SEQ ID NO: 2060 - RNA, 20 nt, synthetic construct
  source 1..20: mol_type = other RNA
tgtagtcccagctacttggg

SEQ ID NO: 2061 - RNA, 20 nt, synthetic construct
  source 1..20: mol_type = other RNA
gcctgtagtcccagctactt

SEQ ID NO: 2062 - RNA, 20 nt, synthetic construct
  source 1..20: mol_type = other RNA
atctcagcctcccaagtagc

SEQ ID NO: 2063 - RNA, 20 nt, synthetic construct
  source 1..20: mol_type = other RNA
tgcctgtagtcccagctact

SEQ ID NO: 2064 - RNA, 20 nt, synthetic construct
  source 1..20: mol_type = other RNA
tctcagcctcccaagtagct

SEQ ID NO: 2065 - RNA, 20 nt, synthetic construct
  source 1..20: mol_type = other RNA
tcccaagtagctgggactac

SEQ ID NO: 2066 - RNA, 20 nt, synthetic construct
  source 1..20: mol_type = other RNA
aaaaaattagccgggcatag

SEQ ID NO: 2067 - RNA, 20 nt, synthetic construct
  source 1..20: mol_type = other RNA
caggcatgcaccactatgcc

SEQ ID NO: 2068 - RNA, 20 nt, synthetic construct
  source 1..20: mol_type = other RNA
cacaaataaaaaaattagcc

SEQ ID NO: 2069 - RNA, 20 nt, synthetic construct
  source 1..20: mol_type = other RNA
ccacaaataaaaaaattagc

SEQ ID NO: 2070 - RNA, 20 nt, synthetic construct
  source 1..20: mol_type = other RNA
ccggctaatttttttatttg

SEQ ID NO: 2071 - RNA, 20 nt, synthetic construct
  source 1..20: mol_type = other RNA
ttttatttgtggtagagatg

SEQ ID NO: 2072 - RNA, 20 nt, synthetic construct
  source 1..20: mol_type = other RNA
aggtctcgctatgtttccca

SEQ ID NO: 2073 - RNA, 20 nt, synthetic construct
  source 1..20: mol_type = other RNA
ctcgctatgtttcccacggc

SEQ ID NO: 2074 - RNA, 20 nt, synthetic construct
  source 1..20: mol_type = other RNA
agaagtttgagaccagccgt

SEQ ID NO: 2075 - RNA, 20 nt, synthetic construct
  source 1..20: mol_type = other RNA
cagaagtttgagaccagccg

SEQ ID NO: 2076 - RNA, 20 nt, synthetic construct
  source 1..20: mol_type = other RNA
cacggctggtctcaaacttc

SEQ ID NO: 2077 - RNA, 20 nt, synthetic construct
  source 1..20: mol_type = other RNA
acggctggtctcaaacttct

SEQ ID NO: 2078 - RNA, 20 nt, synthetic construct
  source 1..20: mol_type = other RNA
gcactttgggaggctaaggc

SEQ ID NO: 2079 - RNA, 20 nt, synthetic construct
  source 1..20: mol_type = other RNA
cactgcactttgggaggcta

SEQ ID NO: 2080 - RNA, 20 nt, synthetic construct
  source 1..20: mol_type = other RNA
gtggcacactgcactttggg

SEQ ID NO: 2081 - RNA, 20 nt, synthetic construct
  source 1..20: mol_type = other RNA
gcagtggcacactgcacttt

SEQ ID NO: 2082 - RNA, 20 nt, synthetic construct
  source 1..20: mol_type = other RNA
tgcagtggcacactgcactt

SEQ ID NO: 2083 - RNA, 20 nt, synthetic construct
  source 1..20: mol_type = other RNA
cattatcaggcgaggtgcag

SEQ ID NO: 2084 - RNA, 20 nt, synthetic construct
  source 1..20: mol_type = other RNA
gaaagacacattatcaggcg

SEQ ID NO: 2085 - RNA, 20 nt, synthetic construct
  source 1..20: mol_type = other RNA
catttgaaagacacattatc

SEQ ID NO: 2086 - RNA, 20 nt, synthetic construct
  source 1..20: mol_type = other RNA
tcaaatgctcagtcttgtgt

SEQ ID NO: 2087 - RNA, 20 nt, synthetic construct
  source 1..20: mol_type = other RNA
gctcagtcttgtgtaggtat

SEQ ID NO: 2088 - RNA, 20 nt, synthetic construct
  source 1..20: mol_type = other RNA
ctcagtcttgtgtaggtatt

SEQ ID NO: 2089 - RNA, 20 nt, synthetic construct
  source 1..20: mol_type = other RNA
tcagtcttgtgtaggtattg

SEQ ID NO: 2090 - RNA, 20 nt, synthetic construct
  source 1..20: mol_type = other RNA
atctgttaatgtctaggatc

SEQ ID NO: 2091 - RNA, 20 nt, synthetic construct
  source 1..20: mol_type = other RNA
tcatacatctgttaatgtct

SEQ ID NO: 2092 - RNA, 20 nt, synthetic construct
  source 1..20: mol_type = other RNA
cagatgtatgatctaatcag

SEQ ID NO: 2093 - RNA, 20 nt, synthetic construct
  source 1..20: mol_type = other RNA
aaacttgctgcaacattatt

SEQ ID NO: 2094 - RNA, 20 nt, synthetic construct
  source 1..20: mol_type = other RNA
gcaagaaaattatagttagc

SEQ ID NO: 2095 - RNA, 20 nt, synthetic construct
  source 1..20: mol_type = other RNA
gttagctggaagcgcgatga

SEQ ID NO: 2096 - RNA, 20 nt, synthetic construct
  source 1..20: mol_type = other RNA
agctggaagcgcgatgaagg

SEQ ID NO: 2097 - RNA, 20 nt, synthetic construct
  source 1..20: mol_type = other RNA
gctggaagcgcgatgaaggt

SEQ ID NO: 2098 - RNA, 20 nt, synthetic construct
  source 1..20: mol_type = other RNA
ggtgggaactcgagctttgc

SEQ ID NO: 2099 - RNA, 20 nt, synthetic construct
  source 1..20: mol_type = other RNA
ggaactcgagctttgcagga

SEQ ID NO: 2100 - RNA, 20 nt, synthetic construct
  source 1..20: mol_type = other RNA
tggctaaaatatagaccaaa

SEQ ID NO: 2101 - RNA, 20 nt, synthetic construct
  source 1..20: mol_type = other RNA
ggctaaaatatagaccaaaa

SEQ ID NO: 2102 - RNA, 20 nt, synthetic construct
  source 1..20: mol_type = other RNA
ctctcctgccttctcccttt

SEQ ID NO: 2103 - RNA, 20 nt, synthetic construct
  source 1..20: mol_type = other RNA
aatatagaccaaaagggaga

SEQ ID NO: 2104 - RNA, 20 nt, synthetic construct
  source 1..20: mol_type = other RNA
tagaccaaaagggagaaggc

SEQ ID NO: 2105 - RNA, 20 nt, synthetic construct
  source 1..20: mol_type = other RNA
agaaggcaggagagcagcac

SEQ ID NO: 2106 - RNA, 20 nt, synthetic construct
  source 1..20: mol_type = other RNA
gaaggcaggagagcagcacc

SEQ ID NO: 2107 - RNA, 20 nt, synthetic construct
  source 1..20: mol_type = other RNA
ggcaggagagcagcaccggg

SEQ ID NO: 2108 - RNA, 20 nt, synthetic construct
  source 1..20: mol_type = other RNA
gcaggagagcagcaccggga

SEQ ID NO: 2109 - RNA, 20 nt, synthetic construct
  source 1..20: mol_type = other RNA
gctgggagcttgctccctcc

SEQ ID NO: 2110 - RNA, 20 nt, synthetic construct
  source 1..20: mol_type = other RNA
gcaagccaaggaagaatgct

SEQ ID NO: 2111 - RNA, 20 nt, synthetic construct
  source 1..20: mol_type = other RNA
tgcaagccaaggaagaatgc

SEQ ID NO: 2112 - RNA, 20 nt, synthetic construct
  source 1..20: mol_type = other RNA
aagctcccagcattcttcct

SEQ ID NO: 2113 - RNA, 20 nt, synthetic construct
  source 1..20: mol_type = other RNA
ccttggttccctgcaagcca

SEQ ID NO: 2114 - RNA, 20 nt, synthetic construct
  source 1..20: mol_type = other RNA
agcattcttccttggcttgc

SEQ ID NO: 2115 - RNA, 20 nt, synthetic construct
  source 1..20: mol_type = other RNA
gcattcttccttggcttgca

SEQ ID NO: 2116 - RNA, 20 nt, synthetic construct
  source 1..20: mol_type = other RNA
ccttggcttgcagggaacca

SEQ ID NO: 2117 - RNA, 20 nt, synthetic construct
  source 1..20: mol_type = other RNA
tcagtcctacctttgcacct

SEQ ID NO: 2118 - RNA, 20 nt, synthetic construct
  source 1..20: mol_type = other RNA
tgcagggaaccaaggtgcaa

SEQ ID NO: 2119 - RNA, 20 nt, synthetic construct
  source 1..20: mol_type = other RNA
gggaaccaaggtgcaaaggt

SEQ ID NO: 2120 - RNA, 20 nt, synthetic construct
  source 1..20: mol_type = other RNA
ggactgagcagaatctgttt

SEQ ID NO: 2121 - RNA, 20 nt, synthetic construct
  source 1..20: mol_type = other RNA
gactgagcagaatctgtttt

SEQ ID NO: 2122 - RNA, 20 nt, synthetic construct
  source 1..20: mol_type = other RNA
tgttttgggagactgcagca

SEQ ID NO: 2123 - RNA, 20 nt, synthetic construct
  source 1..20: mol_type = other RNA
tgggagactgcagcaaggac

SEQ ID NO: 2124 - RNA, 20 nt, synthetic construct
  source 1..20: mol_type = other RNA
agttgttctggaaaaattgc

SEQ ID NO: 2125 - RNA, 20 nt, synthetic construct
  source 1..20: mol_type = other RNA
caagtaaagaacagttgttc

SEQ ID NO: 2126 - RNA, 20 nt, synthetic construct
  source 1..20: mol_type = other RNA
cagaacaactgttctttact

SEQ ID NO: 2127 - RNA, 20 nt, synthetic construct
  source 1..20: mol_type = other RNA
gggagagatggggagtaact

SEQ ID NO: 2128 - RNA, 20 nt, synthetic construct
  source 1..20: mol_type = other RNA
gcaagtcccagggagagatg

SEQ ID NO: 2129 - RNA, 20 nt, synthetic construct
  source 1..20: mol_type = other RNA
ggcaagtcccagggagagat

SEQ ID NO: 2130 - RNA, 20 nt, synthetic construct
  source 1..20: mol_type = other RNA
tggcaagtcccagggagaga

SEQ ID NO: 2131 - RNA, 20 nt, synthetic construct
  source 1..20: mol_type = other RNA
agttactccccatctctccc

SEQ ID NO: 2132 - RNA, 20 nt, synthetic construct
  source 1..20: mol_type = other RNA
gttactccccatctctccct

SEQ ID NO: 2133 - RNA, 20 nt, synthetic construct
  source 1..20: mol_type = other RNA
gggtcccctggcaagtccca

SEQ ID NO: 2134 - RNA, 20 nt, synthetic construct
  source 1..20: mol_type = other RNA
ggggtcccctggcaagtccc

SEQ ID NO: 2135 - RNA, 20 nt, synthetic construct
  source 1..20: mol_type = other RNA
atctctccctgggacttgcc

SEQ ID NO: 2136 - RNA, 20 nt, synthetic construct
  source 1..20: mol_type = other RNA
tctctccctgggacttgcca

SEQ ID NO: 2137 - RNA, 20 nt, synthetic construct
  source 1..20: mol_type = other RNA
ctctccctgggacttgccag

SEQ ID NO: 2138 - RNA, 20 nt, synthetic construct
  source 1..20: mol_type = other RNA
gttgccatgctggggtcccc

SEQ ID NO: 2139 - RNA, 20 nt, synthetic construct
  source 1..20: mol_type = other RNA
cttgccaggggaccccagca

SEQ ID NO: 2140 - RNA, 20 nt, synthetic construct
  source 1..20: mol_type = other RNA
tcattaaggttgccatgctg

SEQ ID NO: 2141 - RNA, 20 nt, synthetic construct
  source 1..20: mol_type = other RNA
atcattaaggttgccatgct

SEQ ID NO: 2142 - RNA, 20 nt, synthetic construct
  source 1..20: mol_type = other RNA
catcattaaggttgccatgc

SEQ ID NO: 2143 - RNA, 20 nt, synthetic construct
  source 1..20: mol_type = other RNA
cagcatggcaaccttaatga

SEQ ID NO: 2144 - RNA, 20 nt, synthetic construct
  source 1..20: mol_type = other RNA
acccagcagaaccatcatta

SEQ ID NO: 2145 - RNA, 20 nt, synthetic construct
  source 1..20: mol_type = other RNA
aaccttaatgatggttctgc

SEQ ID NO: 2146 - RNA, 20 nt, synthetic construct
  source 1..20: mol_type = other RNA
accttaatgatggttctgct

SEQ ID NO: 2147 - RNA, 20 nt, synthetic construct
  source 1..20: mol_type = other RNA
atggttctgctgggtgctag

SEQ ID NO: 2148 - RNA, 20 nt, synthetic construct
  source 1..20: mol_type = other RNA
tgctgggtgctagtggttgc

SEQ ID NO: 2149 - RNA, 20 nt, synthetic construct
  source 1..20: mol_type = other RNA
acaaataaattcagatccct

SEQ ID NO: 2150 - RNA, 20 nt, synthetic construct
  source 1..20: mol_type = other RNA
caaataaattcagatcccta

SEQ ID NO: 2151 - RNA, 20 nt, synthetic construct
  source 1..20: mol_type = other RNA
ctgaagccggtcttacccta

SEQ ID NO: 2152 - RNA, 20 nt, synthetic construct
  source 1..20: mol_type = other RNA
gctgaagccggtcttaccct

SEQ ID NO: 2153 - RNA, 20 nt, synthetic construct
  source 1..20: mol_type = other RNA
tcagatccctagggtaagac

SEQ ID NO: 2154 - RNA, 20 nt, synthetic construct
  source 1..20: mol_type = other RNA
aggagaggtgctgctgaagc

SEQ ID NO: 2155 - RNA, 20 nt, synthetic construct
  source 1..20: mol_type = other RNA
gacgggacccctgtcaggag

SEQ ID NO: 2156 - RNA, 20 nt, synthetic construct
  source 1..20: mol_type = other RNA
tcagcagcacctctcctgac

SEQ ID NO: 2157 - RNA, 20 nt, synthetic construct
  source 1..20: mol_type = other RNA
cagcagcacctctcctgaca

SEQ ID NO: 2158 - RNA, 20 nt, synthetic construct
  source 1..20: mol_type = other RNA
agcagcacctctcctgacag

SEQ ID NO: 2159 - RNA, 20 nt, synthetic construct
  source 1..20: mol_type = other RNA
cctgagacgggacccctgtc

SEQ ID NO: 2160 - RNA, 20 nt, synthetic construct
  source 1..20: mol_type = other RNA
cctgacaggggtcccgtctc

SEQ ID NO: 2161 - RNA, 20 nt, synthetic construct
  source 1..20: mol_type = other RNA
agtcagttctctcctgagac

SEQ ID NO: 2162 - RNA, 20 nt, synthetic construct
  source 1..20: mol_type = other RNA
aagtcagttctctcctgaga

SEQ ID NO: 2163 - RNA, 20 nt, synthetic construct
  source 1..20: mol_type = other RNA
ccccgagcccaggtctgctt

SEQ ID NO: 2164 - RNA, 20 nt, synthetic construct
  source 1..20: mol_type = other RNA
tccccgagcccaggtctgct

SEQ ID NO: 2165 - RNA, 20 nt, synthetic construct
  source 1..20: mol_type = other RNA
gactttgtcccaagcagacc

SEQ ID NO: 2166 - RNA, 20 nt, synthetic construct
  source 1..20: mol_type = other RNA
actttgtcccaagcagacct

SEQ ID NO: 2167 - RNA, 20 nt, synthetic construct
  source 1..20: mol_type = other RNA
gtcccaagcagacctgggct

SEQ ID NO: 2168 - RNA, 20 nt, synthetic construct
  source 1..20: mol_type = other RNA
tcccaagcagacctgggctc

SEQ ID NO: 2169 - RNA, 20 nt, synthetic construct
  source 1..20: mol_type = other RNA
gatgaggattccccgagccc

SEQ ID NO: 2170 - RNA, 20 nt, synthetic construct
  source 1..20: mol_type = other RNA
cccaagcagacctgggctcg

SEQ ID NO: 2171 - RNA, 20 nt, synthetic construct
  source 1..20: mol_type = other RNA
aaactcttgcagaggtgatg

SEQ ID NO: 2172 - RNA, 20 nt, synthetic construct
  source 1..20: mol_type = other RNA
acaacaaaaaactcttgcag

SEQ ID NO: 2173 - RNA, 20 nt, synthetic construct
  source 1..20: mol_type = other RNA
agagtctcgctctgaagccc

SEQ ID NO: 2174 - RNA, 20 nt, synthetic construct
  source 1..20: mol_type = other RNA
tctcgctctgaagcccaggc

SEQ ID NO: 2175 - RNA, 20 nt, synthetic construct
  source 1..20: mol_type = other RNA
acaccactgcactccagcct

SEQ ID NO: 2176 - RNA, 20 nt, synthetic construct
  source 1..20: mol_type = other RNA
cacaccactgcactccagcc

SEQ ID NO: 2177 - RNA, 20 nt, synthetic construct
  source 1..20: mol_type = other RNA
aagcccaggctggagtgcag

SEQ ID NO: 2178 - RNA, 20 nt, synthetic construct
  source 1..20: mol_type = other RNA
ggagtgcagtggtgtgatct

SEQ ID NO: 2179 - RNA, 20 nt, synthetic construct
  source 1..20: mol_type = other RNA
cttgaacctgggggaggtgg

SEQ ID NO: 2180 - RNA, 20 nt, synthetic construct
  source 1..20: mol_type = other RNA
ttgcttgaacctgggggagg

SEQ ID NO: 2181 - RNA, 20 nt, synthetic construct
  source 1..20: mol_type = other RNA
ttgcaacctccacctccccc

SEQ ID NO: 2182 - RNA, 20 nt, synthetic construct
  source 1..20: mol_type = other RNA
gaattgcttgaacctggggg

SEQ ID NO: 2183 - RNA, 20 nt, synthetic construct
  source 1..20: mol_type = other RNA
ggagaattgcttgaacctgg

SEQ ID NO: 2184 - RNA, 20 nt, synthetic construct
  source 1..20: mol_type = other RNA
aggagaattgcttgaacctg

SEQ ID NO: 2185 - RNA, 20 nt, synthetic construct
  source 1..20: mol_type = other RNA
caggagaattgcttgaacct

SEQ ID NO: 2186 - RNA, 20 nt, synthetic construct
  source 1..20: mol_type = other RNA
gcaggagaattgcttgaacc

SEQ ID NO: 2187 - RNA, 20 nt, synthetic construct
  source 1..20: mol_type = other RNA
gttacttgggaggctgaggc

SEQ ID NO: 2188 - RNA, 20 nt, synthetic construct
  source 1..20: mol_type = other RNA
cccagttacttgggaggctg

SEQ ID NO: 2189 - RNA, 20 nt, synthetic construct
  source 1..20: mol_type = other RNA
tgtaatcccagttacttggg

SEQ ID NO: 2190 - RNA, 20 nt, synthetic construct
  source 1..20: mol_type = other RNA
gcctgtaatcccagttactt

SEQ ID NO: 2191 - RNA, 20 nt, synthetic construct
  source 1..20: mol_type = other RNA
gcctcagcctcccaagtaac

SEQ ID NO: 2192 - RNA, 20 nt, synthetic construct
  source 1..20: mol_type = other RNA
cgcctgtaatcccagttact

SEQ ID NO: 2193 - RNA, 20 nt, synthetic construct
  source 1..20: mol_type = other RNA
cctcagcctcccaagtaact

SEQ ID NO: 2194 - RNA, 20 nt, synthetic construct
  source 1..20: mol_type = other RNA
tcccaagtaactgggattac

SEQ ID NO: 2195 - RNA, 20 nt, synthetic construct
  source 1..20: mol_type = other RNA
gaaaaattatccaggtgtgg

SEQ ID NO: 2196 - RNA, 20 nt, synthetic construct
  source 1..20: mol_type = other RNA
caggcgtgcaccaccacacc

SEQ ID NO: 2197 - RNA, 20 nt, synthetic construct
  source 1..20: mol_type = other RNA
atagaaaaattatccaggtg

SEQ ID NO: 2198 - RNA, 20 nt, synthetic construct
  source 1..20: mol_type = other RNA
taaaaatagaaaaattatcc

SEQ ID NO: 2199 - RNA, 20 nt, synthetic construct
  source 1..20: mol_type = other RNA
tttctatttttagtagagac

SEQ ID NO: 2200 - RNA, 20 nt, synthetic construct
  source 1..20: mol_type = other RNA
ttctatttttagtagagaca

SEQ ID NO: 2201 - RNA, 20 nt, synthetic construct
  source 1..20: mol_type = other RNA
gagacagggtttcaccatgt

SEQ ID NO: 2202 - RNA, 20 nt, synthetic construct
  source 1..20: mol_type = other RNA
cgaaaccagcctggccaaca

SEQ ID NO: 2203 - RNA, 20 nt, synthetic construct
  source 1..20: mol_type = other RNA
agggtttcaccatgttggcc

SEQ ID NO: 2204 - RNA, 20 nt, synthetic construct
  source 1..20: mol_type = other RNA
tttcaccatgttggccaggc

SEQ ID NO: 2205 - RNA, 20 nt, synthetic construct
  source 1..20: mol_type = other RNA
tcaggaattcgaaaccagcc

SEQ ID NO: 2206 - RNA, 20 nt, synthetic construct
  source 1..20: mol_type = other RNA
ggtttcgaattcctgacctc

SEQ ID NO: 2207 - RNA, 20 nt, synthetic construct
  source 1..20: mol_type = other RNA
cgggcggatcacctgaggtc

SEQ ID NO: 2208 - RNA, 20 nt, synthetic construct
  source 1..20: mol_type = other RNA
tgaggcgggcggatcacctg

SEQ ID NO: 2209 - RNA, 20 nt, synthetic construct
  source 1..20: mol_type = other RNA
ctttaggagactgaggcggg

SEQ ID NO: 2210 - RNA, 20 nt, synthetic construct
  source 1..20: mol_type = other RNA
acactttaggagactgaggc

SEQ ID NO: 2211 - RNA, 20 nt, synthetic construct
  source 1..20: mol_type = other RNA
aacactttaggagactgagg

SEQ ID NO: 2212 - RNA, 20 nt, synthetic construct
  source 1..20: mol_type = other RNA
ctcaacactttaggagactg

SEQ ID NO: 2213 - RNA, 20 nt, synthetic construct
  source 1..20: mol_type = other RNA
gcctgtaatctcaacacttt

SEQ ID NO: 2214 - RNA, 20 nt, synthetic construct
  source 1..20: mol_type = other RNA
tcctaaagtgttgagattac

SEQ ID NO: 2215 - RNA, 20 nt, synthetic construct
  source 1..20: mol_type = other RNA
ctcctgcaggccgggcgtgg

SEQ ID NO: 2216 - RNA, 20 nt, synthetic construct
  source 1..20: mol_type = other RNA
caggcgtgagccaccacgcc

SEQ ID NO: 2217 - RNA, 20 nt, synthetic construct
  source 1..20: mol_type = other RNA
agactcctgcaggccgggcg

SEQ ID NO: 2218 - RNA, 20 nt, synthetic construct
  source 1..20: mol_type = other RNA
cttaaagactcctgcaggcc

SEQ ID NO: 2219 - RNA, 20 nt, synthetic construct
  source 1..20: mol_type = other RNA
agccaccacgcccggcctgc

SEQ ID NO: 2220 - RNA, 20 nt, synthetic construct
  source 1..20: mol_type = other RNA
tcttaaagactcctgcaggc

SEQ ID NO: 2221 - RNA, 20 nt, synthetic construct
  source 1..20: mol_type = other RNA
tgcctcttaaagactcctgc

SEQ ID NO: 2222 - RNA, 20 nt, synthetic construct
  source 1..20: mol_type = other RNA
ggcctgcaggagtctttaag

SEQ ID NO: 2223 - RNA, 20 nt, synthetic construct
  source 1..20: mol_type = other RNA
tgcaggagtctttaagaggc

SEQ ID NO: 2224 - RNA, 20 nt, synthetic construct
  source 1..20: mol_type = other RNA
gtctttaagaggcaggaaca

SEQ ID NO: 2225 - RNA, 20 nt, synthetic construct
  source 1..20: mol_type = other RNA
agaggcaggaacaaggatgc

SEQ ID NO: 2226 - RNA, 20 nt, synthetic construct
  source 1..20: mol_type = other RNA
atgcaggtgtttcaacagag

SEQ ID NO: 2227 - RNA, 20 nt, synthetic construct
  source 1..20: mol_type = other RNA
gtttcaacagagaggaagcc

SEQ ID NO: 2228 - RNA, 20 nt, synthetic construct
  source 1..20: mol_type = other RNA
tttcaacagagaggaagcct

SEQ ID NO: 2229 - RNA, 20 nt, synthetic construct
  source 1..20: mol_type = other RNA
ttcaacagagaggaagcctg

SEQ ID NO: 2230 - RNA, 20 nt, synthetic construct
  source 1..20: mol_type = other RNA
aacagagaggaagcctgggg

SEQ ID NO: 2231 - RNA, 20 nt, synthetic construct
  source 1..20: mol_type = other RNA
acagagaggaagcctggggt

SEQ ID NO: 2232 - RNA, 20 nt, synthetic construct
  source 1..20: mol_type = other RNA
ggaggaatgaagcccacccc

SEQ ID NO: 2233 - RNA, 20 nt, synthetic construct
  source 1..20: mol_type = other RNA
tgggggcaaagagcacgagg

SEQ ID NO: 2234 - RNA, 20 nt, synthetic construct
  source 1..20: mol_type = other RNA
gaatgggggcaaagagcacg

SEQ ID NO: 2235 - RNA, 20 nt, synthetic construct
  source 1..20: mol_type = other RNA
ctctagcactgagtgaatgg

SEQ ID NO: 2236 - RNA, 20 nt, synthetic construct
  source 1..20: mol_type = other RNA
cctctagcactgagtgaatg

SEQ ID NO: 2237 - RNA, 20 nt, synthetic construct
  source 1..20: mol_type = other RNA
acctctagcactgagtgaat

SEQ ID NO: 2238 - RNA, 20 nt, synthetic construct
  source 1..20: mol_type = other RNA
aacctctagcactgagtgaa

SEQ ID NO: 2239 - RNA, 20 nt, synthetic construct
  source 1..20: mol_type = other RNA
ccccattcactcagtgctag

SEQ ID NO: 2240 - RNA, 20 nt, synthetic construct
  source 1..20: mol_type = other RNA
gagggggccggatgtctcag

SEQ ID NO: 2241 - RNA, 20 nt, synthetic construct
  source 1..20: mol_type = other RNA
cattctgcctctgagacatc

SEQ ID NO: 2242 - RNA, 20 nt, synthetic construct
  source 1..20: mol_type = other RNA
gggatggagagggagggggc

SEQ ID NO: 2243 - RNA, 20 nt, synthetic construct
  source 1..20: mol_type = other RNA
tgtggggatggagagggagg

SEQ ID NO: 2244 - RNA, 20 nt, synthetic construct
  source 1..20: mol_type = other RNA
gtgtggggatggagagggag

SEQ ID NO: 2245 - RNA, 20 nt, synthetic construct
  source 1..20: mol_type = other RNA
ggtgtggggatggagaggga

SEQ ID NO: 2246 - RNA, 20 nt, synthetic construct
  source 1..20: mol_type = other RNA
gggtgtggggatggagaggg

SEQ ID NO: 2247 - RNA, 20 nt, synthetic construct
  source 1..20: mol_type = other RNA
tgagggtgtggggatggaga

SEQ ID NO: 2248 - RNA, 20 nt, synthetic construct
  source 1..20: mol_type = other RNA
gtgagggtgtggggatggag

SEQ ID NO: 2249 - RNA, 20 nt, synthetic construct
  source 1..20: mol_type = other RNA
ggcaggtgagggtgtgggga

SEQ ID NO: 2250 - RNA, 20 nt, synthetic construct
  source 1..20: mol_type = other RNA
ctgtggcaggtgagggtgtg

SEQ ID NO: 2251 - RNA, 20 nt, synthetic construct
  source 1..20: mol_type = other RNA
gctgtggcaggtgagggtgt

SEQ ID NO: 2252 - RNA, 20 nt, synthetic construct
  source 1..20: mol_type = other RNA
agctgtggcaggtgagggtg

SEQ ID NO: 2253 - RNA, 20 nt, synthetic construct
  source 1..20: mol_type = other RNA
atttcagctgtggcaggtga

SEQ ID NO: 2254 - RNA, 20 nt, synthetic construct
  source 1..20: mol_type = other RNA
gatttcagctgtggcaggtg

SEQ ID NO: 2255 - RNA, 20 nt, synthetic construct
  source 1..20: mol_type = other RNA
acctggatttcagctgtggc

SEQ ID NO: 2256 - RNA, 20 nt, synthetic construct
  source 1..20: mol_type = other RNA
gcacacctggatttcagctg

SEQ ID NO: 2257 - RNA, 20 nt, synthetic construct
  source 1..20: mol_type = other RNA
acctgccacagctgaaatcc

SEQ ID NO: 2258 - RNA, 20 nt, synthetic construct
  source 1..20: mol_type = other RNA
gccaggagctgaggcacacc

SEQ ID NO: 2259 - RNA, 20 nt, synthetic construct
  source 1..20: mol_type = other RNA
tggtacccagccaggagctg

SEQ ID NO: 2260 - RNA, 20 nt, synthetic construct
  source 1..20: mol_type = other RNA
tccaggtgtgcctcagctcc

SEQ ID NO: 2261 - RNA, 20 nt, synthetic construct
  source 1..20: mol_type = other RNA
ggtgtgcctcagctcctggc

SEQ ID NO: 2262 - RNA, 20 nt, synthetic construct
  source 1..20: mol_type = other RNA
gtgtgcctcagctcctggct

SEQ ID NO: 2263 - RNA, 20 nt, synthetic construct
  source 1..20: mol_type = other RNA
agtggcagtggtacccagcc

SEQ ID NO: 2264 - RNA, 20 nt, synthetic construct
  source 1..20: mol_type = other RNA
agtctacagatgagtggcag

SEQ ID NO: 2265 - RNA, 20 nt, synthetic construct
  source 1..20: mol_type = other RNA
gtagagagtctacagatgag

SEQ ID NO: 2266 - RNA, 20 nt, synthetic construct
  source 1..20: mol_type = other RNA
catctgtagactctctaccc

SEQ ID NO: 2267 - RNA, 20 nt, synthetic construct
  source 1..20: mol_type = other RNA
tttggcacctgaaggcacca

SEQ ID NO: 2268 - RNA, 20 nt, synthetic construct
  source 1..20: mol_type = other RNA
ctttggcacctgaaggcacc

SEQ ID NO: 2269 - RNA, 20 nt, synthetic construct
  source 1..20: mol_type = other RNA
ctctctaccctggtgccttc

SEQ ID NO: 2270 - RNA, 20 nt, synthetic construct
  source 1..20: mol_type = other RNA
ggatgcactttggcacctga

SEQ ID NO: 2271 - RNA, 20 nt, synthetic construct
  source 1..20: mol_type = other RNA
tgatggcagaggatgcactt

SEQ ID NO: 2272 - RNA, 20 nt, synthetic construct
  source 1..20: mol_type = other RNA
gtgtgtttgactgatggcag

SEQ ID NO: 2273 - RNA, 20 nt, synthetic construct
  source 1..20: mol_type = other RNA
caaactgtgtgtttgactga

SEQ ID NO: 2274 - RNA, 20 nt, synthetic construct
  source 1..20: mol_type = other RNA
cagtcaaacacacagtttga

SEQ ID NO: 2275 - RNA, 20 nt, synthetic construct
  source 1..20: mol_type = other RNA
gaccatgcctgtgtcggtgc

SEQ ID NO: 2276 - RNA, 20 nt, synthetic construct
  source 1..20: mol_type = other RNA
tcagagacctgcaccgacac

SEQ ID NO: 2277 - RNA, 20 nt, synthetic construct
  source 1..20: mol_type = other RNA
gaacctgaccatgcctgtgt

SEQ ID NO: 2278 - RNA, 20 nt, synthetic construct
  source 1..20: mol_type = other RNA
gacctgcaccgacacaggca

SEQ ID NO: 2279 - RNA, 20 nt, synthetic construct
  source 1..20: mol_type = other RNA
gcaccgacacaggcatggtc

SEQ ID NO: 2280 - RNA, 20 nt, synthetic construct
  source 1..20: mol_type = other RNA
acacaggcatggtcaggttc

SEQ ID NO: 2281 - RNA, 20 nt, synthetic construct
  source 1..20: mol_type = other RNA
atggtcaggttcaggtcttg

SEQ ID NO: 2282 - RNA, 20 nt, synthetic construct
  source 1..20: mol_type = other RNA
caggtcttgtggacaagaac

SEQ ID NO: 2283 - RNA, 20 nt, synthetic construct
  source 1..20: mol_type = other RNA
aggtcttgtggacaagaact

SEQ ID NO: 2284 - RNA, 20 nt, synthetic construct
  source 1..20: mol_type = other RNA
ttgtggacaagaactgggtc

SEQ ID NO: 2285 - RNA, 20 nt, synthetic construct
  source 1..20: mol_type = other RNA
tggacaagaactgggtctgg

SEQ ID NO: 2286 - RNA, 20 nt, synthetic construct
  source 1..20: mol_type = other RNA
gaactgggtctggaggagtc

SEQ ID NO: 2287 - RNA, 20 nt, synthetic construct
  source 1..20: mol_type = other RNA
aactgggtctggaggagtca

SEQ ID NO: 2288 - RNA, 20 nt, synthetic construct
  source 1..20: mol_type = other RNA
agtcagggaagatgtagatg

SEQ ID NO: 2289 - RNA, 20 nt, synthetic construct
  source 1..20: mol_type = other RNA
agggaagatgtagatgagga

SEQ ID NO: 2290 - RNA, 20 nt, synthetic construct
  source 1..20: mol_type = other RNA
gaagatgtagatgaggaagg

SEQ ID NO: 2291 - RNA, 20 nt, synthetic construct
  source 1..20: mol_type = other RNA
gtggtactgaaacgaacctc

SEQ ID NO: 2292 - RNA, 20 nt, synthetic construct
  source 1..20: mol_type = other RNA
gtacatcttccctgtaccag

SEQ ID NO: 2293 - RNA, 20 nt, synthetic construct
  source 1..20: mol_type = other RNA
ctgaaacgaacctctggtac

SEQ ID NO: 2294 - RNA, 20 nt, synthetic construct
  source 1..20: mol_type = other RNA
tgaaacgaacctctggtaca

SEQ ID NO: 2295 - RNA, 20 nt, synthetic construct
  source 1..20: mol_type = other RNA
tggtacagggaagatgtacc

SEQ ID NO: 2296 - RNA, 20 nt, synthetic construct
  source 1..20: mol_type = other RNA
cctgggtgactgcagctgcc

SEQ ID NO: 2297 - RNA, 20 nt, synthetic construct
  source 1..20: mol_type = other RNA
ccaggcagctgcagtcaccc

SEQ ID NO: 2298 - RNA, 20 nt, synthetic construct
  source 1..20: mol_type = other RNA
aggactaccatctctcacct

SEQ ID NO: 2299 - RNA, 20 nt, synthetic construct
  source 1..20: mol_type = other RNA
caggactaccatctctcacc

SEQ ID NO: 2300 - RNA, 20 nt, synthetic construct
  source 1..20: mol_type = other RNA
gcagtcacccaggtgagaga

SEQ ID NO: 2301 - RNA, 20 nt, synthetic construct
  source 1..20: mol_type = other RNA
caggtgagagatggtagtcc

SEQ ID NO: 2302 - RNA, 20 nt, synthetic construct
  source 1..20: mol_type = other RNA
tgagagatggtagtcctggc

SEQ ID NO: 2303 - RNA, 20 nt, synthetic construct
  source 1..20: mol_type = other RNA
gaacttagaatgggccagcc

SEQ ID NO: 2304 - RNA, 20 nt, synthetic construct
  source 1..20: mol_type = other RNA
gcagctttggaacttagaat

SEQ ID NO: 2305 - RNA, 20 nt, synthetic construct
  source 1..20: mol_type = other RNA
ggcagctttggaacttagaa

SEQ ID NO: 2306 - RNA, 20 nt, synthetic construct
  source 1..20: mol_type = other RNA
accgatggccaaggcagctt

SEQ ID NO: 2307 - RNA, 20 nt, synthetic construct
  source 1..20: mol_type = other RNA
tctaagttccaaagctgcct

SEQ ID NO: 2308 - RNA, 20 nt, synthetic construct
  source 1..20: mol_type = other RNA
caccctcagaccgatggcca

SEQ ID NO: 2309 - RNA, 20 nt, synthetic construct
  source 1..20: mol_type = other RNA
tccaaagctgccttggccat

SEQ ID NO: 2310 - RNA, 20 nt, synthetic construct
  source 1..20: mol_type = other RNA
ccatcccaccctcagaccga

SEQ ID NO: 2311 - RNA, 20 nt, synthetic construct
  source 1..20: mol_type = other RNA
ctgccttggccatcggtctg

SEQ ID NO: 2312 - RNA, 20 nt, synthetic construct
  source 1..20: mol_type = other RNA
tgccttggccatcggtctga

SEQ ID NO: 2313 - RNA, 20 nt, synthetic construct
  source 1..20: mol_type = other RNA
cttggccatcggtctgaggg

SEQ ID NO: 2314 - RNA, 20 nt, synthetic construct
  source 1..20: mol_type = other RNA
ttggccatcggtctgagggt

SEQ ID NO: 2315 - RNA, 20 nt, synthetic construct
  source 1..20: mol_type = other RNA
ccatcggtctgagggtggga

SEQ ID NO: 2316 - RNA, 20 nt, synthetic construct
  source 1..20: mol_type = other RNA
catcggtctgagggtgggat

SEQ ID NO: 2317 - RNA, 20 nt, synthetic construct
  source 1..20: mol_type = other RNA
atcggtctgagggtgggatg

SEQ ID NO: 2318 - RNA, 20 nt, synthetic construct
  source 1..20: mol_type = other RNA
tcggtctgagggtgggatgg

SEQ ID NO: 2319 - RNA, 20 nt, synthetic construct
  source 1..20: mol_type = other RNA
cggtctgagggtgggatggg

SEQ ID NO: 2320 - RNA, 20 nt, synthetic construct
  source 1..20: mol_type = other RNA
tttatgttctcagagacagc

SEQ ID NO: 2321 - RNA, 20 nt, synthetic construct
  source 1..20: mol_type = other RNA
agctgtctctgagaacataa

SEQ ID NO: 2322 - RNA, 20 nt, synthetic construct
  source 1..20: mol_type = other RNA
gctgtctctgagaacataaa

SEQ ID NO: 2323 - RNA, 20 nt, synthetic construct
  source 1..20: mol_type = other RNA
aacataaagggacccccata

SEQ ID NO: 2324 - RNA, 20 nt, synthetic construct
  source 1..20: mol_type = other RNA
acataaagggacccccatat

SEQ ID NO: 2325 - RNA, 20 nt, synthetic construct
  source 1..20: mol_type = other RNA
tgtcttgaggtcccatatgg

SEQ ID NO: 2326 - RNA, 20 nt, synthetic construct
  source 1..20: mol_type = other RNA
ctgtcttgaggtcccatatg

SEQ ID NO: 2327 - RNA, 20 nt, synthetic construct
  source 1..20: mol_type = other RNA
gctgtcttgaggtcccatat

SEQ ID NO: 2328 - RNA, 20 nt, synthetic construct
  source 1..20: mol_type = other RNA
agctgtcttgaggtcccata

SEQ ID NO: 2329 - RNA, 20 nt, synthetic construct
  source 1..20: mol_type = other RNA
ctgactgctcagctgtcttg

SEQ ID NO: 2330 - RNA, 20 nt, synthetic construct
  source 1..20: mol_type = other RNA
caagacagctgagcagtcag

SEQ ID NO: 2331 - RNA, 20 nt, synthetic construct
  source 1..20: mol_type = other RNA
agtcagaggcgcctctcccg

SEQ ID NO: 2332 - RNA, 20 nt, synthetic construct
  source 1..20: mol_type = other RNA
atgacctggtgccacgggag

SEQ ID NO: 2333 - RNA, 20 nt, synthetic construct
  source 1..20: mol_type = other RNA
atcctatgacctggtgccac

SEQ ID NO: 2334 - RNA, 20 nt, synthetic construct
  source 1..20: mol_type = other RNA
tatcctatgacctggtgcca

SEQ ID NO: 2335 - RNA, 20 nt, synthetic construct
  source 1..20: mol_type = other RNA
ggcgcctctcccgtggcacc

SEQ ID NO: 2336 - RNA, 20 nt, synthetic construct
  source 1..20: mol_type = other RNA
ctcccgtggcaccaggtcat

SEQ ID NO: 2337 - RNA, 20 nt, synthetic construct
  source 1..20: mol_type = other RNA
agtctcattatcctatgacc

SEQ ID NO: 2338 - RNA, 20 nt, synthetic construct
  source 1..20: mol_type = other RNA
gtgccactgcactcaagcgt

SEQ ID NO: 2339 - RNA, 20 nt, synthetic construct
  source 1..20: mol_type = other RNA
agtgccactgcactcaagcg

SEQ ID NO: 2340 - RNA, 20 nt, synthetic construct
  source 1..20: mol_type = other RNA
tcacccacgcttgagtgcag

SEQ ID NO: 2341 - RNA, 20 nt, synthetic construct
  source 1..20: mol_type = other RNA
cacatgaacccgggaggtgg

SEQ ID NO: 2342 - RNA, 20 nt, synthetic construct
  source 1..20: mol_type = other RNA
tcactgcaacctccacctcc

SEQ ID NO: 2343 - RNA, 20 nt, synthetic construct
  source 1..20: mol_type = other RNA
cactgcaacctccacctccc

SEQ ID NO: 2344 - RNA, 20 nt, synthetic construct
  source 1..20: mol_type = other RNA
aatcacatgaacccgggagg

SEQ ID NO: 2345 - RNA, 20 nt, synthetic construct
  source 1..20: mol_type = other RNA
gagaatcacatgaacccggg

SEQ ID NO: 2346 - RNA, 20 nt, synthetic construct
  source 1..20: mol_type = other RNA
gatgagaatcacatgaaccc

SEQ ID NO: 2347 - RNA, 20 nt, synthetic construct
  source 1..20: mol_type = other RNA
ggatgagaatcacatgaacc

SEQ ID NO: 2348 - RNA, 20 nt, synthetic construct
  source 1..20: mol_type = other RNA
tgtgctactcgggagactga

SEQ ID NO: 2349 - RNA, 20 nt, synthetic construct
  source 1..20: mol_type = other RNA
gtgtgctactcgggagactg

SEQ ID NO: 2350 - RNA, 20 nt, synthetic construct
  source 1..20: mol_type = other RNA
tgatggtgcgtgtgctactc

SEQ ID NO: 2351 - RNA, 20 nt, synthetic construct
  source 1..20: mol_type = other RNA
gtgatggtgcgtgtgctact

SEQ ID NO: 2352 - RNA, 20 nt, synthetic construct
  source 1..20: mol_type = other RNA
aaaaattagcctgggcgtga

SEQ ID NO: 2353 - RNA, 20 nt, synthetic construct
  source 1..20: mol_type = other RNA
gcacacgcaccatcacgccc

SEQ ID NO: 2354 - RNA, 20 nt, synthetic construct
  source 1..20: mol_type = other RNA
aaaaatacaaaaattagcct

SEQ ID NO: 2355 - RNA, 20 nt, synthetic construct
  source 1..20: mol_type = other RNA
taaaaatacaaaaattagcc

SEQ ID NO: 2356 - RNA, 20 nt, synthetic construct
  source 1..20: mol_type = other RNA
tttgtatttttagtagagaa

SEQ ID NO: 2357 - RNA, 20 nt, synthetic construct
  source 1..20: mol_type = other RNA
gagaaaggattttgccacgt

SEQ ID NO: 2358 - RNA, 20 nt, synthetic construct
  source 1..20: mol_type = other RNA
gaagaccagcctggccaacg

SEQ ID NO: 2359 - RNA, 20 nt, synthetic construct
  source 1..20: mol_type = other RNA
aggattttgccacgttggcc

SEQ ID NO: 2360 - RNA, 20 nt, synthetic construct
  source 1..20: mol_type = other RNA
ttttgccacgttggccaggc

SEQ ID NO: 2361 - RNA, 20 nt, synthetic construct
  source 1..20: mol_type = other RNA
tcaggagttgaagaccagcc

SEQ ID NO: 2362 - RNA, 20 nt, synthetic construct
  source 1..20: mol_type = other RNA
tgggcagatcatttgaggtc

SEQ ID NO: 2363 - RNA, 20 nt, synthetic construct
  source 1..20: mol_type = other RNA
tgaggtgggcagatcatttg

SEQ ID NO: 2364 - RNA, 20 nt, synthetic construct
  source 1..20: mol_type = other RNA
gtcctttgggaggctgaggt

SEQ ID NO: 2365 - RNA, 20 nt, synthetic construct
  source 1..20: mol_type = other RNA
agtcctttgggaggctgagg

SEQ ID NO: 2366 - RNA, 20 nt, synthetic construct
  source 1..20: mol_type = other RNA
cctagtcctttgggaggctg

SEQ ID NO: 2367 - RNA, 20 nt, synthetic construct
  source 1..20: mol_type = other RNA
tgcccacctcagcctcccaa

SEQ ID NO: 2368 - RNA, 20 nt, synthetic construct
  source 1..20: mol_type = other RNA
tgtaatcctagtcctttggg

SEQ ID NO: 2369 - RNA, 20 nt, synthetic construct
  source 1..20: mol_type = other RNA
gcctgtaatcctagtccttt

SEQ ID NO: 2370 - RNA, 20 nt, synthetic construct
  source 1..20: mol_type = other RNA
tgcctgtaatcctagtcctt

SEQ ID NO: 2371 - RNA, 20 nt, synthetic construct
  source 1..20: mol_type = other RNA
cctcagcctcccaaaggact

SEQ ID NO: 2372 - RNA, 20 nt, synthetic construct
  source 1..20: mol_type = other RNA
tcccaaaggactaggattac

SEQ ID NO: 2373 - RNA, 20 nt, synthetic construct
  source 1..20: mol_type = other RNA
ctaagaatgaccaggcacag

SEQ ID NO: 2374 - RNA, 20 nt, synthetic construct
  source 1..20: mol_type = other RNA
caggcatgagccactgtgcc

SEQ ID NO: 2375 - RNA, 20 nt, synthetic construct
  source 1..20: mol_type = other RNA
cagaaattctaagaatgacc

SEQ ID NO: 2376 - RNA, 20 nt, synthetic construct
  source 1..20: mol_type = other RNA
gtggggctaacaaacggata

SEQ ID NO: 2377 - RNA, 20 nt, synthetic construct
  source 1..20: mol_type = other RNA
tgcttagtggggctaacaaa

SEQ ID NO: 2378 - RNA, 20 nt, synthetic construct
  source 1..20: mol_type = other RNA
tgaaacagccttgcttagtg

SEQ ID NO: 2379 - RNA, 20 nt, synthetic construct
  source 1..20: mol_type = other RNA
ttgaaacagccttgcttagt

SEQ ID NO: 2380 - RNA, 20 nt, synthetic construct
  source 1..20: mol_type = other RNA
tttgaaacagccttgcttag

SEQ ID NO: 2381 - RNA, 20 nt, synthetic construct
  source 1..20: mol_type = other RNA
tttgttagccccactaagca

SEQ ID NO: 2382 - RNA, 20 nt, synthetic construct
  source 1..20: mol_type = other RNA
aagtccccgggtgaggagtg

SEQ ID NO: 2383 - RNA, 20 nt, synthetic construct
  source 1..20: mol_type = other RNA
gaagtccccgggtgaggagt

SEQ ID NO: 2384 - RNA, 20 nt, synthetic construct
  source 1..20: mol_type = other RNA
agaagtccccgggtgaggag

SEQ ID NO: 2385 - RNA, 20 nt, synthetic construct
  source 1..20: mol_type = other RNA
tttctaccccactcctcacc

SEQ ID NO: 2386 - RNA, 20 nt, synthetic construct
  source 1..20: mol_type = other RNA
ttctaccccactcctcaccc

SEQ ID NO: 2387 - RNA, 20 nt, synthetic construct
  source 1..20: mol_type = other RNA
tctaccccactcctcacccg

SEQ ID NO: 2388 - RNA, 20 nt, synthetic construct
  source 1..20: mol_type = other RNA
ttttcagaagtccccgggtg

SEQ ID NO: 2389 - RNA, 20 nt, synthetic construct
  source 1..20: mol_type = other RNA
cactgttttcagaagtcccc

SEQ ID NO: 2390 - RNA, 20 nt, synthetic construct
  source 1..20: mol_type = other RNA
tcactgttttcagaagtccc

SEQ ID NO: 2391 - RNA, 20 nt, synthetic construct
  source 1..20: mol_type = other RNA
gggacttctgaaaacagtga

SEQ ID NO: 2392 - RNA, 20 nt, synthetic construct
  source 1..20: mol_type = other RNA
ggatgatgcccttctttgta

SEQ ID NO: 2393 - RNA, 20 nt, synthetic construct
  source 1..20: mol_type = other RNA
aagtaatcaccttacaaaga

SEQ ID NO: 2394 - RNA, 20 nt, synthetic construct
  source 1..20: mol_type = other RNA
agtaatcaccttacaaagaa

SEQ ID NO: 2395 - RNA, 20 nt, synthetic construct
  source 1..20: mol_type = other RNA
gtttccccatgtgtgaaatg

SEQ ID NO: 2396 - RNA, 20 nt, synthetic construct
  source 1..20: mol_type = other RNA
catcatcctcatttcacaca

SEQ ID NO: 2397 - RNA, 20 nt, synthetic construct
  source 1..20: mol_type = other RNA
atcatcctcatttcacacat

SEQ ID NO: 2398 - RNA, 20 nt, synthetic construct
  source 1..20: mol_type = other RNA
tcatcctcatttcacacatg

SEQ ID NO: 2399 - RNA, 20 nt, synthetic construct
  source 1..20: mol_type = other RNA
tttcacacatggggaaactg

SEQ ID NO: 2400 - RNA, 20 nt, synthetic construct
  source 1..20: mol_type = other RNA
ggaaactgaggaccacagag

SEQ ID NO: 2401 - RNA, 20 nt, synthetic construct
  source 1..20: mol_type = other RNA
gcctctttacttcctctctg

SEQ ID NO: 2402 - RNA, 20 nt, synthetic construct
  source 1..20: mol_type = other RNA
accacagagaggaagtaaag

SEQ ID NO: 2403 - RNA, 20 nt, synthetic construct
  source 1..20: mol_type = other RNA
gagaggaagtaaagaggcca

SEQ ID NO: 2404 - RNA, 20 nt, synthetic construct
  source 1..20: mol_type = other RNA
tagtagcaggtgtgtgacct

SEQ ID NO: 2405 - RNA, 20 nt, synthetic construct
  source 1..20: mol_type = other RNA
tggacggggaacttagtagc

SEQ ID NO: 2406 - RNA, 20 nt, synthetic construct
  source 1..20: mol_type = other RNA
tgctgaaagagcactggacg

SEQ ID NO: 2407 - RNA, 20 nt, synthetic construct
  source 1..20: mol_type = other RNA
ttgctgaaagagcactggac

SEQ ID NO: 2408 - RNA, 20 nt, synthetic construct
  source 1..20: mol_type = other RNA
tttgctgaaagagcactgga

SEQ ID NO: 2409 - RNA, 20 nt, synthetic construct
  source 1..20: mol_type = other RNA
catttttgctgaaagagcac

SEQ ID NO: 2410 - RNA, 20 nt, synthetic construct
  source 1..20: mol_type = other RNA
tctttcagcaaaaatgcatg

SEQ ID NO: 2411 - RNA, 20 nt, synthetic construct
  source 1..20: mol_type = other RNA
gtggtactgaaatgaaggtt

SEQ ID NO: 2412 - RNA, 20 nt, synthetic construct
  source 1..20: mol_type = other RNA
tgaaggtggtactgaaatga

SEQ ID NO: 2413 - RNA, 20 nt, synthetic construct
  source 1..20: mol_type = other RNA
aaacacaaaaatgatgaagg

SEQ ID NO: 2414 - RNA, 20 nt, synthetic construct
  source 1..20: mol_type = other RNA
ggaaaacacaaaaatgatga

SEQ ID NO: 2415 - RNA, 20 nt, synthetic construct
  source 1..20: mol_type = other RNA
aataatagtaaagtgttatg

SEQ ID NO: 2416 - RNA, 20 nt, synthetic construct
  source 1..20: mol_type = other RNA
actttactattatttatgac

SEQ ID NO: 2417 - RNA, 20 nt, synthetic construct
  source 1..20: mol_type = other RNA
ctttactattatttatgaca

SEQ ID NO: 2418 - RNA, 20 nt, synthetic construct
  source 1..20: mol_type = other RNA
agataagtaaaaaaggtgag

SEQ ID NO: 2419 - RNA, 20 nt, synthetic construct
  source 1..20: mol_type = other RNA
aaaagaaagataagtaaaaa

SEQ ID NO: 2420 - RNA, 20 nt, synthetic construct
  source 1..20: mol_type = other RNA
tctttcttttctttttcttt

SEQ ID NO: 2421 - RNA, 20 nt, synthetic construct
  source 1..20: mol_type = other RNA
cttttctttttctttaggag

SEQ ID NO: 2422 - RNA, 20 nt, synthetic construct
  source 1..20: mol_type = other RNA
tctttttctttaggagaggc

SEQ ID NO: 2423 - RNA, 20 nt, synthetic construct
  source 1..20: mol_type = other RNA
aggatctcactctgttgccc

SEQ ID NO: 2424 - RNA, 20 nt, synthetic construct
  source 1..20: mol_type = other RNA
tctcactctgttgcccaggc

SEQ ID NO: 2425 - RNA, 20 nt, synthetic construct
  source 1..20: mol_type = other RNA
catgaaatacactccagcct

SEQ ID NO: 2426 - RNA, 20 nt, synthetic construct
  source 1..20: mol_type = other RNA
tcatgaaatacactccagcc

SEQ ID NO: 2427 - RNA, 20 nt, synthetic construct
  source 1..20: mol_type = other RNA
cgagtgtgcccaggagttgg

SEQ ID NO: 2428 - RNA, 20 nt, synthetic construct
  source 1..20: mol_type = other RNA
tcactgcagcctccaactcc

SEQ ID NO: 2429 - RNA, 20 nt, synthetic construct
  source 1..20: mol_type = other RNA
cactgcagcctccaactcct

SEQ ID NO: 2430 - RNA, 20 nt, synthetic construct
  source 1..20: mol_type = other RNA
gatcgagtgtgcccaggagt

SEQ ID NO: 2431 - RNA, 20 nt, synthetic construct
  source 1..20: mol_type = other RNA
tgggaggatcgagtgtgccc

SEQ ID NO: 2432 - RNA, 20 nt, synthetic construct
  source 1..20: mol_type = other RNA
actctggaggctgaagtggg

SEQ ID NO: 2433 - RNA, 20 nt, synthetic construct
  source 1..20: mol_type = other RNA
gctactctggaggctgaagt

SEQ ID NO: 2434 - RNA, 20 nt, synthetic construct
  source 1..20: mol_type = other RNA
agctactctggaggctgaag

SEQ ID NO: 2435 - RNA, 20 nt, synthetic construct
  source 1..20: mol_type = other RNA
tatagtcccagctactctgg

SEQ ID NO: 2436 - RNA, 20 nt, synthetic construct
  source 1..20: mol_type = other RNA
aactatagtcccagctactc

SEQ ID NO: 2437 - RNA, 20 nt, synthetic construct
  source 1..20: mol_type = other RNA
acttcagcctccagagtagc

SEQ ID NO: 2438 - RNA, 20 nt, synthetic construct
  source 1..20: mol_type = other RNA
cttcagcctccagagtagct

SEQ ID NO: 2439 - RNA, 20 nt, synthetic construct
  source 1..20: mol_type = other RNA
taaaaattagccatgtatga

SEQ ID NO: 2440 - RNA, 20 nt, synthetic construct
  source 1..20: mol_type = other RNA
tagttgtgcaccatcataca

SEQ ID NO: 2441 - RNA, 20 nt, synthetic construct
  source 1..20: mol_type = other RNA
tcatttgtagaaaaattagc

SEQ ID NO: 2442 - RNA, 20 nt, synthetic construct
  source 1..20: mol_type = other RNA
tagaaaaattagctggatgt

SEQ ID NO: 2443 - RNA, 20 nt, synthetic construct
  source 1..20: mol_type = other RNA
attagctggatgtaggagaa

SEQ ID NO: 2444 - RNA, 20 nt, synthetic construct
  source 1..20: mol_type = other RNA
taggagaatggcgtgaaccc

SEQ ID NO: 2445 - RNA, 20 nt, synthetic construct
  source 1..20: mol_type = other RNA
gagaatggcgtgaacccagg

SEQ ID NO: 2446 - RNA, 20 nt, synthetic construct
  source 1..20: mol_type = other RNA
aatggcgtgaacccaggagg

SEQ ID NO: 2447 - RNA, 20 nt, synthetic construct
  source 1..20: mol_type = other RNA
cactgcaagctccgcctcct

SEQ ID NO: 2448 - RNA, 20 nt, synthetic construct
  source 1..20: mol_type = other RNA
tcactgcaagctccgcctcc

SEQ ID NO: 2449 - RNA, 20 nt, synthetic construct
  source 1..20: mol_type = other RNA
ggactgcagtggcgctatct

SEQ ID NO: 2450 - RNA, 20 nt, synthetic construct
  source 1..20: mol_type = other RNA
tcgcccaggctggactgcag

SEQ ID NO: 2451 - RNA, 20 nt, synthetic construct
  source 1..20: mol_type = other RNA
agcgccactgcagtccagcc

SEQ ID NO: 2452 - RNA, 20 nt, synthetic construct
  source 1..20: mol_type = other RNA
gcgccactgcagtccagcct

SEQ ID NO: 2453 - RNA, 20 nt, synthetic construct
  source 1..20: mol_type = other RNA
tcgcgctctttcgcccaggc

SEQ ID NO: 2454 - RNA, 20 nt, synthetic construct
  source 1..20: mol_type = other RNA
ggagtcgcgctctttcgccc

SEQ ID NO: 2455 - RNA, 20 nt, synthetic construct
  source 1..20: mol_type = other RNA
ctttttttctttttttgaga

SEQ ID NO: 2456 - RNA, 20 nt, synthetic construct
  source 1..20: mol_type = other RNA
aattagctggacatagtggc

SEQ ID NO: 2457 - RNA, 20 nt, synthetic construct
  source 1..20: mol_type = other RNA
tcccgagcagctgggattac

SEQ ID NO: 2458 - RNA, 20 nt, synthetic construct
  source 1..20: mol_type = other RNA
cctcagcctcccgagcagct

SEQ ID NO: 2459 - RNA, 20 nt, synthetic construct
  source 1..20: mol_type = other RNA
tgcctgtaatcccagctgct

SEQ ID NO: 2460 - RNA, 20 nt, synthetic construct
  source 1..20: mol_type = other RNA
gcctcagcctcccgagcagc

SEQ ID NO: 2461 - RNA, 20 nt, synthetic construct
  source 1..20: mol_type = other RNA
gcctgtaatcccagctgctc

SEQ ID NO: 2462 - RNA, 20 nt, synthetic construct
  source 1..20: mol_type = other RNA
tgtaatcccagctgctcggg

SEQ ID NO: 2463 - RNA, 20 nt, synthetic construct
  source 1..20: mol_type = other RNA
cccagctgctcgggaggctg

SEQ ID NO: 2464 - RNA, 20 nt, synthetic construct
  source 1..20: mol_type = other RNA
gctgctcgggaggctgaggc

SEQ ID NO: 2465 - RNA, 20 nt, synthetic construct
  source 1..20: mol_type = other RNA
aatcagttgaacccagaacc

SEQ ID NO: 2466 - RNA, 20 nt, synthetic construct
  source 1..20: mol_type = other RNA
acctccgcctcccgggttct

SEQ ID NO: 2467 - RNA, 20 nt, synthetic construct
  source 1..20: mol_type = other RNA
atcagttgaacccagaaccc

SEQ ID NO: 2468 - RNA, 20 nt, synthetic construct
  source 1..20: mol_type = other RNA
aacctccgcctcccgggttc

SEQ ID NO: 2469 - RNA, 20 nt, synthetic construct
  source 1..20: mol_type = other RNA
agttgaacccagaacccggg

SEQ ID NO: 2470 - RNA, 20 nt, synthetic construct
  source 1..20: mol_type = other RNA
tgaacccagaacccgggagg

SEQ ID NO: 2471 - RNA, 20 nt, synthetic construct
  source 1..20: mol_type = other RNA
cgctgcaacctccgcctccc

SEQ ID NO: 2472 - RNA, 20 nt, synthetic construct
  source 1..20: mol_type = other RNA
tcgctgcaacctccgcctcc

SEQ ID NO: 2473 - RNA, 20 nt, synthetic construct
  source 1..20: mol_type = other RNA
acccagaacccgggaggcgg

SEQ ID NO: 2474 - RNA, 20 nt, synthetic construct
  source 1..20: mol_type = other RNA
agagtgcaatggcatgatct

SEQ ID NO: 2475 - RNA, 20 nt, synthetic construct
  source 1..20: mol_type = other RNA
attgccaggctagagtgcaa

SEQ ID NO: 2476 - RNA, 20 nt, synthetic construct
  source 1..20: mol_type = other RNA
catgccattgcactctagcc

SEQ ID NO: 2477 - RNA, 20 nt, synthetic construct
  source 1..20: mol_type = other RNA
ggagtttcactcttattgcc

SEQ ID NO: 2478 - RNA, 20 nt, synthetic construct
  source 1..20: mol_type = other RNA
tgtttttgtttttttttaga

SEQ ID NO: 2479 - RNA, 20 nt, synthetic construct
  source 1..20: mol_type = other RNA
cctatgtctacaaattgttg

SEQ ID NO: 2480 - RNA, 20 nt, synthetic construct
  source 1..20: mol_type = other RNA
ccctatgtctacaaattgtt

SEQ ID NO: 2481 - RNA, 20 nt, synthetic construct
  source 1..20: mol_type = other RNA
accctatgtctacaaattgt

SEQ ID NO: 2482 - RNA, 20 nt, synthetic construct
  source 1..20: mol_type = other RNA
ccccaacaatttgtagacat

SEQ ID NO: 2483 - RNA, 20 nt, synthetic construct
  source 1..20: mol_type = other RNA
cccaacaatttgtagacata

SEQ ID NO: 2484 - RNA, 20 nt, synthetic construct
  source 1..20: mol_type = other RNA
agggtgtcactatgttgccc

SEQ ID NO: 2485 - RNA, 20 nt, synthetic construct
  source 1..20: mol_type = other RNA
cgggagttggaggctagcct

SEQ ID NO: 2486 - RNA, 20 nt, synthetic construct
  source 1..20: mol_type = other RNA
ccgggagttggaggctagcc

SEQ ID NO: 2487 - RNA, 20 nt, synthetic construct
  source 1..20: mol_type = other RNA
tgcttgaagccgggagttgg

SEQ ID NO: 2488 - RNA, 20 nt, synthetic construct
  source 1..20: mol_type = other RNA
ccaggctagcctccaactcc

SEQ ID NO: 2489 - RNA, 20 nt, synthetic construct
  source 1..20: mol_type = other RNA
gattgcttgaagccgggagt

SEQ ID NO: 2490 - RNA, 20 nt, synthetic construct
  source 1..20: mol_type = other RNA
caggaggattgcttgaagcc

SEQ ID NO: 2491 - RNA, 20 nt, synthetic construct
  source 1..20: mol_type = other RNA
gcaggaggattgcttgaagc

SEQ ID NO: 2492 - RNA, 20 nt, synthetic construct
  source 1..20: mol_type = other RNA
ttttgggaggccgaagcagg

SEQ ID NO: 2493 - RNA, 20 nt, synthetic construct
  source 1..20: mol_type = other RNA
ttcaagcaatcctcctgctt

SEQ ID NO: 2494 - RNA, 20 nt, synthetic construct
  source 1..20: mol_type = other RNA
acattttgggaggccgaagc

SEQ ID NO: 2495 - RNA, 20 nt, synthetic construct
  source 1..20: mol_type = other RNA
tgtaattccaacattttggg

SEQ ID NO: 2496 - RNA, 20 nt, synthetic construct
  source 1..20: mol_type = other RNA
gcctgtaattccaacatttt

SEQ ID NO: 2497 - RNA, 20 nt, synthetic construct
  source 1..20: mol_type = other RNA
gcttcggcctcccaaaatgt

SEQ ID NO: 2498 - RNA, 20 nt, synthetic construct
  source 1..20: mol_type = other RNA
tgcctgtaattccaacattt

SEQ ID NO: 2499 - RNA, 20 nt, synthetic construct
  source 1..20: mol_type = other RNA
tcccaaaatgttggaattac

SEQ ID NO: 2500 - RNA, 20 nt, synthetic construct
  source 1..20: mol_type = other RNA
aattacaggcacaagccacc

SEQ ID NO: 2501 - RNA, 20 nt, synthetic construct
  source 1..20: mol_type = other RNA
aagtagatggctgggccagg

SEQ ID NO: 2502 - RNA, 20 nt, synthetic construct
  source 1..20: mol_type = other RNA
ataaagtagatggctgggcc

SEQ ID NO: 2503 - RNA, 20 nt, synthetic construct
  source 1..20: mol_type = other RNA
tgaatataaagtagatggct

SEQ ID NO: 2504 - RNA, 20 nt, synthetic construct
  source 1..20: mol_type = other RNA
ttgaatataaagtagatggc

SEQ ID NO: 2505 - RNA, 20 nt, synthetic construct
  source 1..20: mol_type = other RNA
ttatttgaatataaagtaga

SEQ ID NO: 2506 - RNA, 20 nt, synthetic construct
  source 1..20: mol_type = other RNA
ccattttttccctttataat

SEQ ID NO: 2507 - RNA, 20 nt, synthetic construct
  source 1..20: mol_type = other RNA
aactttacgtcccattataa

SEQ ID NO: 2508 - RNA, 20 nt, synthetic construct
  source 1..20: mol_type = other RNA
gccattttttccctttataa

SEQ ID NO: 2509 - RNA, 20 nt, synthetic construct
  source 1..20: mol_type = other RNA
actttacgtcccattataaa

SEQ ID NO: 2510 - RNA, 20 nt, synthetic construct
  source 1..20: mol_type = other RNA
cccattataaagggaaaaaa

SEQ ID NO: 2511 - RNA, 20 nt, synthetic construct
  source 1..20: mol_type = other RNA
agggaaaaaatggcaaaaac

SEQ ID NO: 2512 - RNA, 20 nt, synthetic construct
  source 1..20: mol_type = other RNA
gaaaaaatggcaaaaacagg

SEQ ID NO: 2513 - RNA, 20 nt, synthetic construct
  source 1..20: mol_type = other RNA
cactctgctttcttgttaaa

SEQ ID NO: 2514 - RNA, 20 nt, synthetic construct
  source 1..20: mol_type = other RNA
aagatactgttgactgtaga

SEQ ID NO: 2515 - RNA, 20 nt, synthetic construct
  source 1..20: mol_type = other RNA
gttgactgtagaaggctctg

SEQ ID NO: 2516 - RNA, 20 nt, synthetic construct
  source 1..20: mol_type = other RNA
gagtgatcatatattagaag

SEQ ID NO: 2517 - RNA, 20 nt, synthetic construct
  source 1..20: mol_type = other RNA
tcaaggaggaagtctcagct

SEQ ID NO: 2518 - RNA, 20 nt, synthetic construct
  source 1..20: mol_type = other RNA
tcctcctggtggtatcaagg

SEQ ID NO: 2519 - RNA, 20 nt, synthetic construct
  source 1..20: mol_type = other RNA
ccatcctcctggtggtatca

SEQ ID NO: 2520 - RNA, 20 nt, synthetic construct
  source 1..20: mol_type = other RNA
acttcctccttgataccacc

SEQ ID NO: 2521 - RNA, 20 nt, synthetic construct
  source 1..20: mol_type = other RNA
tcctccttgataccaccagg

SEQ ID NO: 2522 - RNA, 20 nt, synthetic construct
  source 1..20: mol_type = other RNA
gtctctgcccatcctcctgg

SEQ ID NO: 2523 - RNA, 20 nt, synthetic construct
  source 1..20: mol_type = other RNA
ccttgataccaccaggagga

SEQ ID NO: 2524 - RNA, 20 nt, synthetic construct
  source 1..20: mol_type = other RNA
ccagtctctgcccatcctcc

SEQ ID NO: 2525 - RNA, 20 nt, synthetic construct
  source 1..20: mol_type = other RNA
cttgataccaccaggaggat

SEQ ID NO: 2526 - RNA, 20 nt, synthetic construct
  source 1..20: mol_type = other RNA
ccaggaggatgggcagagac

SEQ ID NO: 2527 - RNA, 20 nt, synthetic construct
  source 1..20: mol_type = other RNA
agacactaactttctcccta

SEQ ID NO: 2528 - RNA, 20 nt, synthetic construct
  source 1..20: mol_type = other RNA
gacactaactttctccctat

SEQ ID NO: 2529 - RNA, 20 nt, synthetic construct
  source 1..20: mol_type = other RNA
aaataatactgactcccata

SEQ ID NO: 2530 - RNA, 20 nt, synthetic construct
  source 1..20: mol_type = other RNA
taaataatactgactcccat

SEQ ID NO: 2531 - RNA, 20 nt, synthetic construct
  source 1..20: mol_type = other RNA
agtattatttagcatcactt

SEQ ID NO: 2532 - RNA, 20 nt, synthetic construct
  source 1..20: mol_type = other RNA
attatttagcatcactttgg

SEQ ID NO: 2533 - RNA, 20 nt, synthetic construct
  source 1..20: mol_type = other RNA
ttatttagcatcactttggc

SEQ ID NO: 2534 - RNA, 20 nt, synthetic construct
  source 1..20: mol_type = other RNA
ccttgtagtcagatggtttg

SEQ ID NO: 2535 - RNA, 20 nt, synthetic construct
  source 1..20: mol_type = other RNA
cccttgtagtcagatggttt

SEQ ID NO: 2536 - RNA, 20 nt, synthetic construct
  source 1..20: mol_type = other RNA
acccttgtagtcagatggtt

SEQ ID NO: 2537 - RNA, 20 nt, synthetic construct
  source 1..20: mol_type = other RNA
atggtacccttgtagtcaga

SEQ ID NO: 2538 - RNA, 20 nt, synthetic construct
  source 1..20: mol_type = other RNA
ccccaaaccatctgactaca

SEQ ID NO: 2539 - RNA, 20 nt, synthetic construct
  source 1..20: mol_type = other RNA
cccaaaccatctgactacaa

SEQ ID NO: 2540 - RNA, 20 nt, synthetic construct
  source 1..20: mol_type = other RNA
gactacaagggtaccatatt

SEQ ID NO: 2541 - RNA, 20 nt, synthetic construct
  source 1..20: mol_type = other RNA
actacaagggtaccatattt

SEQ ID NO: 2542 - RNA, 20 nt, synthetic construct
  source 1..20: mol_type = other RNA
aaagagtgttaacccaaata

SEQ ID NO: 2543 - RNA, 20 nt, synthetic construct
  source 1..20: mol_type = other RNA
tatttgggttaacactcttt

SEQ ID NO: 2544 - RNA, 20 nt, synthetic construct
  source 1..20: mol_type = other RNA
tatgttttagtccaatgtct

SEQ ID NO: 2545 - RNA, 20 nt, synthetic construct
  source 1..20: mol_type = other RNA
tcattttcatcccaagacat

SEQ ID NO: 2546 - RNA, 20 nt, synthetic construct
  source 1..20: mol_type = other RNA
atgttttagtccaatgtctt

SEQ ID NO: 2547 - RNA, 20 nt, synthetic construct
  source 1..20: mol_type = other RNA
tgtcttgggatgaaaatgac

SEQ ID NO: 2548 - RNA, 20 nt, synthetic construct
  source 1..20: mol_type = other RNA
cttgggatgaaaatgacagg

SEQ ID NO: 2549 - RNA, 20 nt, synthetic construct
  source 1..20: mol_type = other RNA
ttgggatgaaaatgacaggt

SEQ ID NO: 2550 - RNA, 20 nt, synthetic construct
  source 1..20: mol_type = other RNA
atttctctggagatcataag

SEQ ID NO: 2551 - RNA, 20 nt, synthetic construct
  source 1..20: mol_type = other RNA
caaattgccctgaatttctc

SEQ ID NO: 2552 - RNA, 20 nt, synthetic construct
  source 1..20: mol_type = other RNA
tatgatctccagagaaattc

SEQ ID NO: 2553 - RNA, 20 nt, synthetic construct
  source 1..20: mol_type = other RNA
atgatctccagagaaattca

SEQ ID NO: 2554 - RNA, 20 nt, synthetic construct
  source 1..20: mol_type = other RNA
cagagaaattcagggcaatt

SEQ ID NO: 2555 - RNA, 20 nt, synthetic construct
  source 1..20: mol_type = other RNA
aaattcagggcaatttggtg

SEQ ID NO: 2556 - RNA, 20 nt, synthetic construct
  source 1..20: mol_type = other RNA
aattcagggcaatttggtgt

SEQ ID NO: 2557 - RNA, 20 nt, synthetic construct
  source 1..20: mol_type = other RNA
gggcaatttggtgtgggagt

SEQ ID NO: 2558 - RNA, 20 nt, synthetic construct
  source 1..20: mol_type = other RNA
atttggtgtgggagtaggca

SEQ ID NO: 2559 - RNA, 20 nt, synthetic construct
  source 1..20: mol_type = other RNA
tgtgggagtaggcatggtag

SEQ ID NO: 2560 - RNA, 20 nt, synthetic construct
  source 1..20: mol_type = other RNA
atctaagaagtccccagcag

SEQ ID NO: 2561 - RNA, 20 nt, synthetic construct
  source 1..20: mol_type = other RNA
caagctgagagcctctgctg

SEQ ID NO: 2562 - RNA, 20 nt, synthetic construct
  source 1..20: mol_type = other RNA
acaagctgagagcctctgct

SEQ ID NO: 2563 - RNA, 20 nt, synthetic construct
  source 1..20: mol_type = other RNA
gacaagctgagagcctctgc

SEQ ID NO: 2564 - RNA, 20 nt, synthetic construct
  source 1..20: mol_type = other RNA
gaggctctcagcttgtcttg

SEQ ID NO: 2565 - RNA, 20 nt, synthetic construct
  source 1..20: mol_type = other RNA
tcagcttgtcttgaggcatc

SEQ ID NO: 2566 - RNA, 20 nt, synthetic construct
  source 1..20: mol_type = other RNA
cagcttgtcttgaggcatct

SEQ ID NO: 2567 - RNA, 20 nt, synthetic construct
  source 1..20: mol_type = other RNA
cttgtcttgaggcatctggg

SEQ ID NO: 2568 - RNA, 20 nt, synthetic construct
  source 1..20: mol_type = other RNA
gtcttgaggcatctgggcgg

SEQ ID NO: 2569 - RNA, 20 nt, synthetic construct
  source 1..20: mol_type = other RNA
tcttgaggcatctgggcgga

SEQ ID NO: 2570 - RNA, 20 nt, synthetic construct
  source 1..20: mol_type = other RNA
tgggcggagggctatgatac

SEQ ID NO: 2571 - RNA, 20 nt, synthetic construct
  source 1..20: mol_type = other RNA
ctgccaccttctgcaggatg

SEQ ID NO: 2572 - RNA, 20 nt, synthetic construct
  source 1..20: mol_type = other RNA
tctgccaccttctgcaggat

SEQ ID NO: 2573 - RNA, 20 nt, synthetic construct
  source 1..20: mol_type = other RNA
atctgccaccttctgcagga

SEQ ID NO: 2574 - RNA, 20 nt, synthetic construct
  source 1..20: mol_type = other RNA
tactggccccatcctgcaga

SEQ ID NO: 2575 - RNA, 20 nt, synthetic construct
  source 1..20: mol_type = other RNA
caatatctgccaccttctgc

SEQ ID NO: 2576 - RNA, 20 nt, synthetic construct
  source 1..20: mol_type = other RNA
tggccccatcctgcagaagg

SEQ ID NO: 2577 - RNA, 20 nt, synthetic construct
  source 1..20: mol_type = other RNA
ctgcagaaggtggcagatat

SEQ ID NO: 2578 - RNA, 20 nt, synthetic construct
  source 1..20: mol_type = other RNA
aggtggcagatattggcagc

SEQ ID NO: 2579 - RNA, 20 nt, synthetic construct
  source 1..20: mol_type = other RNA
attggcagctggcaccagtg

SEQ ID NO: 2580 - RNA, 20 nt, synthetic construct
  source 1..20: mol_type = other RNA
tgatcacaatggaaccgcac

SEQ ID NO: 2581 - RNA, 20 nt, synthetic construct
  source 1..20: mol_type = other RNA
ttcagaaatgatgatcacaa

SEQ ID NO: 2582 - RNA, 20 nt, synthetic construct
  source 1..20: mol_type = other RNA
tctgaacgtcagactgttga

SEQ ID NO: 2583 - RNA, 20 nt, synthetic construct
  source 1..20: mol_type = other RNA
ttgcacagaaagtctgttgg

SEQ ID NO: 2584 - RNA, 20 nt, synthetic construct
  source 1..20: mol_type = other RNA
gttgcacagaaagtctgttg

SEQ ID NO: 2585 - RNA, 20 nt, synthetic construct
  source 1..20: mol_type = other RNA
agttgcacagaaagtctgtt

SEQ ID NO: 2586 - RNA, 20 nt, synthetic construct
  source 1..20: mol_type = other RNA
aagttgcacagaaagtctgt

SEQ ID NO: 2587 - RNA, 20 nt, synthetic construct
  source 1..20: mol_type = other RNA
tccttactgtggactgaatt

SEQ ID NO: 2588 - RNA, 20 nt, synthetic construct
  source 1..20: mol_type = other RNA
accaaattcagtccacagta

SEQ ID NO: 2589 - RNA, 20 nt, synthetic construct
  source 1..20: mol_type = other RNA
ttaatttcacttccttactg

SEQ ID NO: 2590 - RNA, 20 nt, synthetic construct
  source 1..20: mol_type = other RNA
ggaagtgaaattaatttcag

SEQ ID NO: 2591 - RNA, 20 nt, synthetic construct
  source 1..20: mol_type = other RNA
tgaaattaatttcagaggtg

SEQ ID NO: 2592 - RNA, 20 nt, synthetic construct
  source 1..20: mol_type = other RNA
gaaattaatttcagaggtgt

SEQ ID NO: 2593 - RNA, 20 nt, synthetic construct
  source 1..20: mol_type = other RNA
aaattaatttcagaggtgtg

SEQ ID NO: 2594 - RNA, 20 nt, synthetic construct
  source 1..20: mol_type = other RNA
ttaatttcagaggtgtgggg

SEQ ID NO: 2595 - RNA, 20 nt, synthetic construct
  source 1..20: mol_type = other RNA
taatttcagaggtgtgggga

SEQ ID NO: 2596 - RNA, 20 nt, synthetic construct
  source 1..20: mol_type = other RNA
agaggtgtggggagggctta

SEQ ID NO: 2597 - RNA, 20 nt, synthetic construct
  source 1..20: mol_type = other RNA
gaggtgtggggagggcttaa

SEQ ID NO: 2598 - RNA, 20 nt, synthetic construct
  source 1..20: mol_type = other RNA
ggggagggcttaagggagtg

SEQ ID NO: 2599 - RNA, 20 nt, synthetic construct
  source 1..20: mol_type = other RNA
agggagtgtggtaaaattag

SEQ ID NO: 2600 - RNA, 20 nt, synthetic construct
  source 1..20: mol_type = other RNA
gggagtgtggtaaaattaga

SEQ ID NO: 2601 - RNA, 20 nt, synthetic construct
  source 1..20: mol_type = other RNA
gaaacagaaatctgaccgct

SEQ ID NO: 2602 - RNA, 20 nt, synthetic construct
  source 1..20: mol_type = other RNA
aaacagaaatctgaccgctt

SEQ ID NO: 2603 - RNA, 20 nt, synthetic construct
  source 1..20: mol_type = other RNA
aacagaaatctgaccgcttg

SEQ ID NO: 2604 - RNA, 20 nt, synthetic construct
  source 1..20: mol_type = other RNA
ccctgcaaggtggccccaag

SEQ ID NO: 2605 - RNA, 20 nt, synthetic construct
  source 1..20: mol_type = other RNA
accgcttggggccaccttgc

SEQ ID NO: 2606 - RNA, 20 nt, synthetic construct
  source 1..20: mol_type = other RNA
aaaaaactctccctgcaagg

SEQ ID NO: 2607 - RNA, 20 nt, synthetic construct
  source 1..20: mol_type = other RNA
ccgcttggggccaccttgca

SEQ ID NO: 2608 - RNA, 20 nt, synthetic construct
  source 1..20: mol_type = other RNA
tcaaaaaaactctccctgca

SEQ ID NO: 2609 - RNA, 20 nt, synthetic construct
  source 1..20: mol_type = other RNA
acatgcaaagaaacaagtga

SEQ ID NO: 2610 - RNA, 20 nt, synthetic construct
  source 1..20: mol_type = other RNA
aacatgcaaagaaacaagtg

SEQ ID NO: 2611 - RNA, 20 nt, synthetic construct
  source 1..20: mol_type = other RNA
tcacttgtttctttgcatgt

SEQ ID NO: 2612 - RNA, 20 nt, synthetic construct
  source 1..20: mol_type = other RNA
ctttgcatgttggcttagct

SEQ ID NO: 2613 - RNA, 20 nt, synthetic construct
  source 1..20: mol_type = other RNA
tgcatgttggcttagcttgg

SEQ ID NO: 2614 - RNA, 20 nt, synthetic construct
  source 1..20: mol_type = other RNA
gcatgttggcttagcttggc

SEQ ID NO: 2615 - RNA, 20 nt, synthetic construct
  source 1..20: mol_type = other RNA
tagcttggcgggctcccaac

SEQ ID NO: 2616 - RNA, 20 nt, synthetic construct
  source 1..20: mol_type = other RNA
tcactaaccagtcaccagtt

SEQ ID NO: 2617 - RNA, 20 nt, synthetic construct
  source 1..20: mol_type = other RNA
atcactaaccagtcaccagt

SEQ ID NO: 2618 - RNA, 20 nt, synthetic construct
  source 1..20: mol_type = other RNA
gcgggctcccaactggtgac

SEQ ID NO: 2619 - RNA, 20 nt, synthetic construct
  source 1..20: mol_type = other RNA
ctggtgactggttagtgatg

SEQ ID NO: 2620 - RNA, 20 nt, synthetic construct
  source 1..20: mol_type = other RNA
tagtgatgaggctagtgatg

SEQ ID NO: 2621 - RNA, 20 nt, synthetic construct
  source 1..20: mol_type = other RNA
gaggctgtgtgcttctgagc

SEQ ID NO: 2622 - RNA, 20 nt, synthetic construct
  source 1..20: mol_type = other RNA
aggctgtgtgcttctgagct

SEQ ID NO: 2623 - RNA, 20 nt, synthetic construct
  source 1..20: mol_type = other RNA
cttctgagctgggcatccga

SEQ ID NO: 2624 - RNA, 20 nt, synthetic construct
  source 1..20: mol_type = other RNA
agcttccccaaggatgcctt

SEQ ID NO: 2625 - RNA, 20 nt, synthetic construct
  source 1..20: mol_type = other RNA
tgggcatccgaaggcatcct

SEQ ID NO: 2626 - RNA, 20 nt, synthetic construct
  source 1..20: mol_type = other RNA
gggcatccgaaggcatcctt

SEQ ID NO: 2627 - RNA, 20 nt, synthetic construct
  source 1..20: mol_type = other RNA
ggcatccgaaggcatccttg

SEQ ID NO: 2628 - RNA, 20 nt, synthetic construct
  source 1..20: mol_type = other RNA
tcgtgccctcagcttcccca

SEQ ID NO: 2629 - RNA, 20 nt, synthetic construct
  source 1..20: mol_type = other RNA
aggcatccttggggaagctg

SEQ ID NO: 2630 - RNA, 20 nt, synthetic construct
  source 1..20: mol_type = other RNA
ggcatccttggggaagctga

SEQ ID NO: 2631 - RNA, 20 nt, synthetic construct
  source 1..20: mol_type = other RNA
ttggggaagctgagggcacg

SEQ ID NO: 2632 - RNA, 20 nt, synthetic construct
  source 1..20: mol_type = other RNA
gggaagctgagggcacgagg

SEQ ID NO: 2633 - RNA, 20 nt, synthetic construct
  source 1..20: mol_type = other RNA
ggaagctgagggcacgagga

SEQ ID NO: 2634 - RNA, 20 nt, synthetic construct
  source 1..20: mol_type = other RNA
gaagctgagggcacgaggag

SEQ ID NO: 2635 - RNA, 20 nt, synthetic construct
  source 1..20: mol_type = other RNA
gaggaggggctgccagactc

SEQ ID NO: 2636 - RNA, 20 nt, synthetic construct
  source 1..20: mol_type = other RNA
aggaggggctgccagactcc

SEQ ID NO: 2637 - RNA, 20 nt, synthetic construct
  source 1..20: mol_type = other RNA
aggcagcagctcccggagtc

SEQ ID NO: 2638 - RNA, 20 nt, synthetic construct
  source 1..20: mol_type = other RNA
cccagccaggcagcagctcc

SEQ ID NO: 2639 - RNA, 20 nt, synthetic construct
  source 1..20: mol_type = other RNA
agactccgggagctgctgcc

SEQ ID NO: 2640 - RNA, 20 nt, synthetic construct
  source 1..20: mol_type = other RNA
tccgggagctgctgcctggc

SEQ ID NO: 2641 - RNA, 20 nt, synthetic construct
  source 1..20: mol_type = other RNA
ccgggagctgctgcctggct

SEQ ID NO: 2642 - RNA, 20 nt, synthetic construct
  source 1..20: mol_type = other RNA
attgtgtaggaatcccagcc

SEQ ID NO: 2643 - RNA, 20 nt, synthetic construct
  source 1..20: mol_type = other RNA
agccaggcaacgcattgtgt

SEQ ID NO: 2644 - RNA, 20 nt, synthetic construct
  source 1..20: mol_type = other RNA
ttcctacacaatgcgttgcc

SEQ ID NO: 2645 - RNA, 20 nt, synthetic construct
  source 1..20: mol_type = other RNA
acccagcagggcgtggagcc

SEQ ID NO: 2646 - RNA, 20 nt, synthetic construct
  source 1..20: mol_type = other RNA
aggtaggacccagcagggcg

SEQ ID NO: 2647 - RNA, 20 nt, synthetic construct
  source 1..20: mol_type = other RNA
tgcctggctccacgccctgc

SEQ ID NO: 2648 - RNA, 20 nt, synthetic construct
  source 1..20: mol_type = other RNA
gcctggctccacgccctgct

SEQ ID NO: 2649 - RNA, 20 nt, synthetic construct
  source 1..20: mol_type = other RNA
ctgacaggtaggacccagca

SEQ ID NO: 2650 - RNA, 20 nt, synthetic construct
  source 1..20: mol_type = other RNA
tctgacaggtaggacccagc

SEQ ID NO: 2651 - RNA, 20 nt, synthetic construct
  source 1..20: mol_type = other RNA
accttggggctctgacaggt

SEQ ID NO: 2652 - RNA, 20 nt, synthetic construct
  source 1..20: mol_type = other RNA
ttttaccttggggctctgac

SEQ ID NO: 2653 - RNA, 20 nt, synthetic construct
  source 1..20: mol_type = other RNA
tcctacctgtcagagcccca

SEQ ID NO: 2654 - RNA, 20 nt, synthetic construct
  source 1..20: mol_type = other RNA
ttcccggcctttttaccttg

SEQ ID NO: 2655 - RNA, 20 nt, synthetic construct
  source 1..20: mol_type = other RNA
tttcccggcctttttacctt

SEQ ID NO: 2656 - RNA, 20 nt, synthetic construct
  source 1..20: mol_type = other RNA
ctttcccggcctttttacct

SEQ ID NO: 2657 - RNA, 20 nt, synthetic construct
  source 1..20: mol_type = other RNA
gtcagagccccaaggtaaaa

SEQ ID NO: 2658 - RNA, 20 nt, synthetic construct
  source 1..20: mol_type = other RNA
gagccccaaggtaaaaaggc

SEQ ID NO: 2659 - RNA, 20 nt, synthetic construct
  source 1..20: mol_type = other RNA
agccccaaggtaaaaaggcc

SEQ ID NO: 2660 - RNA, 20 nt, synthetic construct
  source 1..20: mol_type = other RNA
gctaaattaagatgctttcc

SEQ ID NO: 2661 - RNA, 20 nt, synthetic construct
  source 1..20: mol_type = other RNA
atttagcgtgcagtctcagc

SEQ ID NO: 2662 - RNA, 20 nt, synthetic construct
  source 1..20: mol_type = other RNA
ctctgtttatctggaatggc

SEQ ID NO: 2663 - RNA, 20 nt, synthetic construct
  source 1..20: mol_type = other RNA
gtttctctgtttatctggaa

SEQ ID NO: 2664 - RNA, 20 nt, synthetic construct
  source 1..20: mol_type = other RNA
gaatggtttctctgtttatc

SEQ ID NO: 2665 - RNA, 20 nt, synthetic construct
  source 1..20: mol_type = other RNA
cccccatccccaattcagaa

SEQ ID NO: 2666 - RNA, 20 nt, synthetic construct
  source 1..20: mol_type = other RNA
acagagaaaccattctgaat

SEQ ID NO: 2667 - RNA, 20 nt, synthetic construct
  source 1..20: mol_type = other RNA
cagagaaaccattctgaatt

SEQ ID NO: 2668 - RNA, 20 nt, synthetic construct
  source 1..20: mol_type = other RNA
agagaaaccattctgaattg

SEQ ID NO: 2669 - RNA, 20 nt, synthetic construct
  source 1..20: mol_type = other RNA
aaaccattctgaattgggga

SEQ ID NO: 2670 - RNA, 20 nt, synthetic construct
  source 1..20: mol_type = other RNA
aaccattctgaattggggat

SEQ ID NO: 2671 - RNA, 20 nt, synthetic construct
  source 1..20: mol_type = other RNA
accattctgaattggggatg

SEQ ID NO: 2672 - RNA, 20 nt, synthetic construct
  source 1..20: mol_type = other RNA
ccattctgaattggggatgg

SEQ ID NO: 2673 - RNA, 20 nt, synthetic construct
  source 1..20: mol_type = other RNA
ctgaattggggatgggggtg

SEQ ID NO: 2674 - RNA, 20 nt, synthetic construct
  source 1..20: mol_type = other RNA
attggggatgggggtgagga

SEQ ID NO: 2675 - RNA, 20 nt, synthetic construct
  source 1..20: mol_type = other RNA
ttggggatgggggtgaggat

SEQ ID NO: 2676 - RNA, 20 nt, synthetic construct
  source 1..20: mol_type = other RNA
atgggggtgaggatgggaac

SEQ ID NO: 2677 - RNA, 20 nt, synthetic construct
  source 1..20: mol_type = other RNA
aacaggagtctgtgtcctgc

SEQ ID NO: 2678 - RNA, 20 nt, synthetic construct
  source 1..20: mol_type = other RNA
acaggagtctgtgtcctgct

SEQ ID NO: 2679 - RNA, 20 nt, synthetic construct
  source 1..20: mol_type = other RNA
caggagtctgtgtcctgctg

SEQ ID NO: 2680 - RNA, 20 nt, synthetic construct
  source 1..20: mol_type = other RNA
ttccaatggcctgccccagc

SEQ ID NO: 2681 - RNA, 20 nt, synthetic construct
  source 1..20: mol_type = other RNA
agtctgtgtcctgctggggc

SEQ ID NO: 2682 - RNA, 20 nt, synthetic construct
  source 1..20: mol_type = other RNA
gtcctgctggggcaggccat

SEQ ID NO: 2683 - RNA, 20 nt, synthetic construct
  source 1..20: mol_type = other RNA
aactctttcacatcttccaa

SEQ ID NO: 2684 - RNA, 20 nt, synthetic construct
  source 1..20: mol_type = other RNA
agttgtctatttccttccac

SEQ ID NO: 2685 - RNA, 20 nt, synthetic construct
  source 1..20: mol_type = other RNA
tgaagtctccctccggtgga

SEQ ID NO: 2686 - RNA, 20 nt, synthetic construct
  source 1..20: mol_type = other RNA
tgtctatttccttccaccgg

SEQ ID NO: 2687 - RNA, 20 nt, synthetic construct
  source 1..20: mol_type = other RNA
gtctatttccttccaccgga

SEQ ID NO: 2688 - RNA, 20 nt, synthetic construct
  source 1..20: mol_type = other RNA
gacctgaagtctccctccgg

SEQ ID NO: 2689 - RNA, 20 nt, synthetic construct
  source 1..20: mol_type = other RNA
gctgacctgaagtctccctc

SEQ ID NO: 2690 - RNA, 20 nt, synthetic construct
  source 1..20: mol_type = other RNA
ttccaccggagggagacttc

SEQ ID NO: 2691 - RNA, 20 nt, synthetic construct
  source 1..20: mol_type = other RNA
agggagacttcaggtcagcc

SEQ ID NO: 2692 - RNA, 20 nt, synthetic construct
  source 1..20: mol_type = other RNA
cttcaggtcagccaggtgtc

SEQ ID NO: 2693 - RNA, 20 nt, synthetic construct
  source 1..20: mol_type = other RNA
tggttcatactccagacacc

SEQ ID NO: 2694 - RNA, 20 nt, synthetic construct
  source 1..20: mol_type = other RNA
aacctttcggtgctgataca

SEQ ID NO: 2695 - RNA, 20 nt, synthetic construct
  source 1..20: mol_type = other RNA
aaccatgtatcagcaccgaa

SEQ ID NO: 2696 - RNA, 20 nt, synthetic construct
  source 1..20: mol_type = other RNA
gtctgacttctagaaccttt

SEQ ID NO: 2697 - RNA, 20 nt, synthetic construct
  source 1..20: mol_type = other RNA
ggttctagaagtcagacttt

SEQ ID NO: 2698 - RNA, 20 nt, synthetic construct
  source 1..20: mol_type = other RNA
gttctagaagtcagactttc

SEQ ID NO: 2699 - RNA, 20 nt, synthetic construct
  source 1..20: mol_type = other RNA
gtcactaactctcagcatgc

SEQ ID NO: 2700 - RNA, 20 nt, synthetic construct
  source 1..20: mol_type = other RNA
taactctcagcatgctggcc

SEQ ID NO: 2701 - RNA, 20 nt, synthetic construct
  source 1..20: mol_type = other RNA
ctcagcatgctggcctggct

SEQ ID NO: 2702 - RNA, 20 nt, synthetic construct
  source 1..20: mol_type = other RNA
accttgctgtgggccgagcc

SEQ ID NO: 2703 - RNA, 20 nt, synthetic construct
  source 1..20: mol_type = other RNA
gcctggctcggcccacagca

SEQ ID NO: 2704 - RNA, 20 nt, synthetic construct
  source 1..20: mol_type = other RNA
aggcgagaagaccttgctgt

SEQ ID NO: 2705 - RNA, 20 nt, synthetic construct
  source 1..20: mol_type = other RNA
gaggcgagaagaccttgctg

SEQ ID NO: 2706 - RNA, 20 nt, synthetic construct
  source 1..20: mol_type = other RNA
aaggtcttctcgcctccctt

SEQ ID NO: 2707 - RNA, 20 nt, synthetic construct
  source 1..20: mol_type = other RNA
aggtcttctcgcctcccttt

SEQ ID NO: 2708 - RNA, 20 nt, synthetic construct
  source 1..20: mol_type = other RNA
ctcagtatttacccaaaggg

SEQ ID NO: 2709 - RNA, 20 nt, synthetic construct
  source 1..20: mol_type = other RNA
cccctcagtatttacccaaa

SEQ ID NO: 2710 - RNA, 20 nt, synthetic construct
  source 1..20: mol_type = other RNA
acccctcagtatttacccaa

SEQ ID NO: 2711 - RNA, 20 nt, synthetic construct
  source 1..20: mol_type = other RNA
ctccctttgggtaaatactg

SEQ ID NO: 2712 - RNA, 20 nt, synthetic construct
  source 1..20: mol_type = other RNA
tccctttgggtaaatactga

SEQ ID NO: 2713 - RNA, 20 nt, synthetic construct
  source 1..20: mol_type = other RNA
ccctttgggtaaatactgag

SEQ ID NO: 2714 - RNA, 20 nt, synthetic construct
  source 1..20: mol_type = other RNA
atactgaggggtgcctctgc

SEQ ID NO: 2715 - RNA, 20 nt, synthetic construct
  source 1..20: mol_type = other RNA
gcagaggtcccgtcctgcag

SEQ ID NO: 2716 - RNA, 20 nt, synthetic construct
  source 1..20: mol_type = other RNA
tgaggggtgcctctgcagga

SEQ ID NO: 2717 - RNA, 20 nt, synthetic construct
  source 1..20: mol_type = other RNA
gaggggtgcctctgcaggac

SEQ ID NO: 2718 - RNA, 20 nt, synthetic construct
  source 1..20: mol_type = other RNA
tatggagtggagtctggcag

SEQ ID NO: 2719 - RNA, 20 nt, synthetic construct
  source 1..20: mol_type = other RNA
tctgggtatggagtggagtc

SEQ ID NO: 2720 - RNA, 20 nt, synthetic construct
  source 1..20: mol_type = other RNA
ctgcttctctgggtatggag

SEQ ID NO: 2721 - RNA, 20 nt, synthetic construct
  source 1..20: mol_type = other RNA
tttccctgcttctctgggta

SEQ ID NO: 2722 - RNA, 20 nt, synthetic construct
  source 1..20: mol_type = other RNA
tttggtttccctgcttctct

SEQ ID NO: 2723 - RNA, 20 nt, synthetic construct
  source 1..20: mol_type = other RNA
ttttggtttccctgcttctc

SEQ ID NO: 2724 - RNA, 20 nt, synthetic construct
  source 1..20: mol_type = other RNA
cactccatacccagagaagc

SEQ ID NO: 2725 - RNA, 20 nt, synthetic construct
  source 1..20: mol_type = other RNA
actccatacccagagaagca

SEQ ID NO: 2726 - RNA, 20 nt, synthetic construct
  source 1..20: mol_type = other RNA
agaagcagggaaaccaaaat

SEQ ID NO: 2727 - RNA, 20 nt, synthetic construct
  source 1..20: mol_type = other RNA
ctcaaggctgactccaattt

SEQ ID NO: 2728 - RNA, 20 nt, synthetic construct
  source 1..20: mol_type = other RNA
caaaattggagtcagccttg

SEQ ID NO: 2729 - RNA, 20 nt, synthetic construct
  source 1..20: mol_type = other RNA
ggctcaacagctacacctca

SEQ ID NO: 2730 - RNA, 20 nt, synthetic construct
  source 1..20: mol_type = other RNA
cagctctccccagctgctga

SEQ ID NO: 2731 - RNA, 20 nt, synthetic construct
  source 1..20: mol_type = other RNA
ccagctctccccagctgctg

SEQ ID NO: 2732 - RNA, 20 nt, synthetic construct
  source 1..20: mol_type = other RNA
gctgttgagccctcagcagc

SEQ ID NO: 2733 - RNA, 20 nt, synthetic construct
  source 1..20: mol_type = other RNA
ctgttgagccctcagcagct

SEQ ID NO: 2734 - RNA, 20 nt, synthetic construct
  source 1..20: mol_type = other RNA
tgttgagccctcagcagctg

SEQ ID NO: 2735 - RNA, 20 nt, synthetic construct
  source 1..20: mol_type = other RNA
cctcagcagctggggagagc

SEQ ID NO: 2736 - RNA, 20 nt, synthetic construct
  source 1..20: mol_type = other RNA
cagcagctggggagagctgg

SEQ ID NO: 2737 - RNA, 20 nt, synthetic construct
  source 1..20: mol_type = other RNA
ccattaggaaactgggggga

SEQ ID NO: 2738 - RNA, 20 nt, synthetic construct
  source 1..20: mol_type = other RNA
accattaggaaactgggggg

SEQ ID NO: 2739 - RNA, 20 nt, synthetic construct
  source 1..20: mol_type = other RNA
aacaccattaggaaactggg

SEQ ID NO: 2740 - RNA, 20 nt, synthetic construct
  source 1..20: mol_type = other RNA
caacaccattaggaaactgg

SEQ ID NO: 2741 - RNA, 20 nt, synthetic construct
  source 1..20: mol_type = other RNA
acaacaccattaggaaactg

SEQ ID NO: 2742 - RNA, 20 nt, synthetic construct
  source 1..20: mol_type = other RNA
aacaacaccattaggaaact

SEQ ID NO: 2743 - RNA, 20 nt, synthetic construct
  source 1..20: mol_type = other RNA
aaacaacaccattaggaaac

SEQ ID NO: 2744 - RNA, 20 nt, synthetic construct
  source 1..20: mol_type = other RNA
ccctccccccagtttcctaa

SEQ ID NO: 2745 - RNA, 20 nt, synthetic construct
  source 1..20: mol_type = other RNA
cctttttaaacaacaccatt

SEQ ID NO: 2746 - RNA, 20 nt, synthetic construct
  source 1..20: mol_type = other RNA
cctaatggtgttgtttaaaa

SEQ ID NO: 2747 - RNA, 20 nt, synthetic construct
  source 1..20: mol_type = other RNA
ctaatggtgttgtttaaaaa

SEQ ID NO: 2748 - RNA, 20 nt, synthetic construct
  source 1..20: mol_type = other RNA
ggtgttgtttaaaaagggtc

SEQ ID NO: 2749 - RNA, 20 nt, synthetic construct
  source 1..20: mol_type = other RNA
gtgttgtttaaaaagggtca

SEQ ID NO: 2750 - RNA, 20 nt, synthetic construct
  source 1..20: mol_type = other RNA
tgttgtttaaaaagggtcag

SEQ ID NO: 2751 - RNA, 20 nt, synthetic construct
  source 1..20: mol_type = other RNA
gtttaaaaagggtcagggga

SEQ ID NO: 2752 - RNA, 20 nt, synthetic construct
  source 1..20: mol_type = other RNA
tttaaaaagggtcaggggac

SEQ ID NO: 2753 - RNA, 20 nt, synthetic construct
  source 1..20: mol_type = other RNA
ttaaaaagggtcaggggacg

SEQ ID NO: 2754 - RNA, 20 nt, synthetic construct
  source 1..20: mol_type = other RNA
taaaaagggtcaggggacgg

SEQ ID NO: 2755 - RNA, 20 nt, synthetic construct
  source 1..20: mol_type = other RNA
tcaggggacgggggaacaga

SEQ ID NO: 2756 - RNA, 20 nt, synthetic construct
  source 1..20: mol_type = other RNA
ggggacgggggaacagatgg

SEQ ID NO: 2757 - RNA, 20 nt, synthetic construct
  source 1..20: mol_type = other RNA
gggacgggggaacagatggt

SEQ ID NO: 2758 - RNA, 20 nt, synthetic construct
  source 1..20: mol_type = other RNA
aagagcacagtgcagacacc

SEQ ID NO: 2759 - RNA, 20 nt, synthetic construct
  source 1..20: mol_type = other RNA
acagtgcagacacctggcac

SEQ ID NO: 2760 - RNA, 20 nt, synthetic construct
  source 1..20: mol_type = other RNA
ctgccttcagagccggtgcc

SEQ ID NO: 2761 - RNA, 20 nt, synthetic construct
  source 1..20: mol_type = other RNA
tgccatgctgccttcagagc

SEQ ID NO: 2762 - RNA, 20 nt, synthetic construct
  source 1..20: mol_type = other RNA
acacctggcaccggctctga

SEQ ID NO: 2763 - RNA, 20 nt, synthetic construct
  source 1..20: mol_type = other RNA
caccggctctgaaggcagca

SEQ ID NO: 2764 - RNA, 20 nt, synthetic construct
  source 1..20: mol_type = other RNA
cagcatggcagctacaccgt

SEQ ID NO: 2765 - RNA, 20 nt, synthetic construct
  source 1..20: mol_type = other RNA
atggcagctacaccgttggc

SEQ ID NO: 2766 - RNA, 20 nt, synthetic construct
  source 1..20: mol_type = other RNA
tggcagctacaccgttggct

SEQ ID NO: 2767 - RNA, 20 nt, synthetic construct
  source 1..20: mol_type = other RNA
ggcacacccttcccagccaa

SEQ ID NO: 2768 - RNA, 20 nt, synthetic construct
  source 1..20: mol_type = other RNA
agctacaccgttggctggga

SEQ ID NO: 2769 - RNA, 20 nt, synthetic construct
  source 1..20: mol_type = other RNA
gctacaccgttggctgggaa

SEQ ID NO: 2770 - RNA, 20 nt, synthetic construct
  source 1..20: mol_type = other RNA
aatgtaaacgacttcttcag

SEQ ID NO: 2771 - RNA, 20 nt, synthetic construct
  source 1..20: mol_type = other RNA
gaatgtaaacgacttcttca

SEQ ID NO: 2772 - RNA, 20 nt, synthetic construct
  source 1..20: mol_type = other RNA
agaatgtaaacgacttcttc

SEQ ID NO: 2773 - RNA, 20 nt, synthetic construct
  source 1..20: mol_type = other RNA
cattctcgagtcaattttcc

SEQ ID NO: 2774 - RNA, 20 nt, synthetic construct
  source 1..20: mol_type = other RNA
acaggtccattgtacactcc

SEQ ID NO: 2775 - RNA, 20 nt, synthetic construct
  source 1..20: mol_type = other RNA
aattttcctggagtgtacaa

SEQ ID NO: 2776 - RNA, 20 nt, synthetic construct
  source 1..20: mol_type = other RNA
tggagtgtacaatggacctg

SEQ ID NO: 2777 - RNA, 20 nt, synthetic construct
  source 1..20: mol_type = other RNA
ggagtgtacaatggacctgt

SEQ ID NO: 2778 - RNA, 20 nt, synthetic construct
  source 1..20: mol_type = other RNA
tttcatacaggctttcccac

SEQ ID NO: 2779 - RNA, 20 nt, synthetic construct
  source 1..20: mol_type = other RNA
tcatcattaccctttcatac

SEQ ID NO: 2780 - RNA, 20 nt, synthetic construct
  source 1..20: mol_type = other RNA
tgtgggaaagcctgtatgaa

SEQ ID NO: 2781 - RNA, 20 nt, synthetic construct
  source 1..20: mol_type = other RNA
gtgggaaagcctgtatgaaa

SEQ ID NO: 2782 - RNA, 20 nt, synthetic construct
  source 1..20: mol_type = other RNA
tgtatgaaagggtaatgatg

SEQ ID NO: 2783 - RNA, 20 nt, synthetic construct
  source 1..20: mol_type = other RNA
gtatgaaagggtaatgatga

SEQ ID NO: 2784 - RNA, 20 nt, synthetic construct
  source 1..20: mol_type = other RNA
aaaatattggacactgtgct

SEQ ID NO: 2785 - RNA, 20 nt, synthetic construct
  source 1..20: mol_type = other RNA
ttccagttcctataaaatat

SEQ ID NO: 2786 - RNA, 20 nt, synthetic construct
  source 1..20: mol_type = other RNA
cacagtgtccaatattttat

SEQ ID NO: 2787 - RNA, 20 nt, synthetic construct
  source 1..20: mol_type = other RNA
gtccaatattttataggaac

SEQ ID NO: 2788 - RNA, 20 nt, synthetic construct
  source 1..20: mol_type = other RNA
ggaactggaattgagctcat

SEQ ID NO: 2789 - RNA, 20 nt, synthetic construct
  source 1..20: mol_type = other RNA
tcataggagctcaattttat

SEQ ID NO: 2790 - RNA, 20 nt, synthetic construct
  source 1..20: mol_type = other RNA
tttattggcattgctgttgt

SEQ ID NO: 2791 - RNA, 20 nt, synthetic construct
  source 1..20: mol_type = other RNA
ttggcattgctgttgttgga

SEQ ID NO: 2792 - RNA, 20 nt, synthetic construct
  source 1..20: mol_type = other RNA
tgctgttgttggatggttaa

SEQ ID NO: 2793 - RNA, 20 nt, synthetic construct
  source 1..20: mol_type = other RNA
gctgttgttggatggttaaa

SEQ ID NO: 2794 - RNA, 20 nt, synthetic construct
  source 1..20: mol_type = other RNA
ctgttgttggatggttaaag

SEQ ID NO: 2795 - RNA, 20 nt, synthetic construct
  source 1..20: mol_type = other RNA
ttgttggatggttaaagggg

SEQ ID NO: 2796 - RNA, 20 nt, synthetic construct
  source 1..20: mol_type = other RNA
ttcaggggagtctgagaaaa

SEQ ID NO: 2797 - RNA, 20 nt, synthetic construct
  source 1..20: mol_type = other RNA
tttcaggggagtctgagaaa

SEQ ID NO: 2798 - RNA, 20 nt, synthetic construct
  source 1..20: mol_type = other RNA
aagcaaaccatacatttcag

SEQ ID NO: 2799 - RNA, 20 nt, synthetic construct
  source 1..20: mol_type = other RNA
aaagcaaaccatacatttca

SEQ ID NO: 2800 - RNA, 20 nt, synthetic construct
  source 1..20: mol_type = other RNA
caaagcaaaccatacatttc

SEQ ID NO: 2801 - RNA, 20 nt, synthetic construct
  source 1..20: mol_type = other RNA
tcagactcccctgaaatgta

SEQ ID NO: 2802 - RNA, 20 nt, synthetic construct
  source 1..20: mol_type = other RNA
cagacctgtcatcagtctct

SEQ ID NO: 2803 - RNA, 20 nt, synthetic construct
  source 1..20: mol_type = other RNA
gcagacctgtcatcagtctc

SEQ ID NO: 2804 - RNA, 20 nt, synthetic construct
  source 1..20: mol_type = other RNA
tgaacccagagactgatgac

SEQ ID NO: 2805 - RNA, 20 nt, synthetic construct
  source 1..20: mol_type = other RNA
gagactgatgacaggtctgc

SEQ ID NO: 2806 - RNA, 20 nt, synthetic construct
  source 1..20: mol_type = other RNA
tgatgacaggtctgccggtg

SEQ ID NO: 2807 - RNA, 20 nt, synthetic construct
  source 1..20: mol_type = other RNA
aaggctgcacccaaccacac

SEQ ID NO: 2808 - RNA, 20 nt, synthetic construct
  source 1..20: mol_type = other RNA
gacaggtctgccggtgtggt

SEQ ID NO: 2809 - RNA, 20 nt, synthetic construct
  source 1..20: mol_type = other RNA
acaggtctgccggtgtggtt

SEQ ID NO: 2810 - RNA, 20 nt, synthetic construct
  source 1..20: mol_type = other RNA
cactttcccgtagcaactta

SEQ ID NO: 2811 - RNA, 20 nt, synthetic construct
  source 1..20: mol_type = other RNA
ggtgcagccttaagttgcta

SEQ ID NO: 2812 - RNA, 20 nt, synthetic construct
  source 1..20: mol_type = other RNA
gtgcagccttaagttgctac

SEQ ID NO: 2813 - RNA, 20 nt, synthetic construct
  source 1..20: mol_type = other RNA
aagttgctacgggaaagtgt

SEQ ID NO: 2814 - RNA, 20 nt, synthetic construct
  source 1..20: mol_type = other RNA
ttgctacgggaaagtgttgg

SEQ ID NO: 2815 - RNA, 20 nt, synthetic construct
  source 1..20: mol_type = other RNA
tgctacgggaaagtgttgga

SEQ ID NO: 2816 - RNA, 20 nt, synthetic construct
  source 1..20: mol_type = other RNA
gctacgggaaagtgttggag

SEQ ID NO: 2817 - RNA, 20 nt, synthetic construct
  source 1..20: mol_type = other RNA
ctacgggaaagtgttggagg

SEQ ID NO: 2818 - RNA, 20 nt, synthetic construct
  source 1..20: mol_type = other RNA
gttggagggggagaagtcag

SEQ ID NO: 2819 - RNA, 20 nt, synthetic construct
  source 1..20: mol_type = other RNA
tggaattgagggagggggca

SEQ ID NO: 2820 - RNA, 20 nt, synthetic construct
  source 1..20: mol_type = other RNA
tcatctggaattgagggagg

SEQ ID NO: 2821 - RNA, 20 nt, synthetic construct
  source 1..20: mol_type = other RNA
ctcatctggaattgagggag

SEQ ID NO: 2822 - RNA, 20 nt, synthetic construct
  source 1..20: mol_type = other RNA
cctcatctggaattgaggga

SEQ ID NO: 2823 - RNA, 20 nt, synthetic construct
  source 1..20: mol_type = other RNA
tcctcatctggaattgaggg

SEQ ID NO: 2824 - RNA, 20 nt, synthetic construct
  source 1..20: mol_type = other RNA
atttcctcatctggaattga

SEQ ID NO: 2825 - RNA, 20 nt, synthetic construct
  source 1..20: mol_type = other RNA
aatttcctcatctggaattg

SEQ ID NO: 2826 - RNA, 20 nt, synthetic construct
  source 1..20: mol_type = other RNA
ccctccctcaattccagatg

SEQ ID NO: 2827 - RNA, 20 nt, synthetic construct
  source 1..20: mol_type = other RNA
caggcctgaatttcctcatc

SEQ ID NO: 2828 - RNA, 20 nt, synthetic construct
  source 1..20: mol_type = other RNA
aattccagatgaggaaattc

SEQ ID NO: 2829 - RNA, 20 nt, synthetic construct
  source 1..20: mol_type = other RNA
gaggaaattcaggcctgaaa

SEQ ID NO: 2830 - RNA, 20 nt, synthetic construct
  source 1..20: mol_type = other RNA
aggaaattcaggcctgaaaa

SEQ ID NO: 2831 - RNA, 20 nt, synthetic construct
  source 1..20: mol_type = other RNA
ggtggtcactttcccttttc

SEQ ID NO: 2832 - RNA, 20 nt, synthetic construct
  source 1..20: mol_type = other RNA
caaggcatgagactttgagg

SEQ ID NO: 2833 - RNA, 20 nt, synthetic construct
  source 1..20: mol_type = other RNA
ctccaaggcatgagactttg

SEQ ID NO: 2834 - RNA, 20 nt, synthetic construct
  source 1..20: mol_type = other RNA
cacctcaaagtctcatgcct

SEQ ID NO: 2835 - RNA, 20 nt, synthetic construct
  source 1..20: mol_type = other RNA
ctcaaagtctcatgccttgg

SEQ ID NO: 2836 - RNA, 20 nt, synthetic construct
  source 1..20: mol_type = other RNA
gattcctgctgggtcctcca

SEQ ID NO: 2837 - RNA, 20 nt, synthetic construct
  source 1..20: mol_type = other RNA
catgccttggaggacccagc

SEQ ID NO: 2838 - RNA, 20 nt, synthetic construct
  source 1..20: mol_type = other RNA
agaggtcttggattcctgct

SEQ ID NO: 2839 - RNA, 20 nt, synthetic construct
  source 1..20: mol_type = other RNA
cagaggtcttggattcctgc

SEQ ID NO: 2840 - RNA, 20 nt, synthetic construct
  source 1..20: mol_type = other RNA
ccggtccttttcagaggtct

SEQ ID NO: 2841 - RNA, 20 nt, synthetic construct
  source 1..20: mol_type = other RNA
ggaatccaagacctctgaaa

SEQ ID NO: 2842 - RNA, 20 nt, synthetic construct
  source 1..20: mol_type = other RNA
gccctgccggtccttttcag

SEQ ID NO: 2843 - RNA, 20 nt, synthetic construct
  source 1..20: mol_type = other RNA
ccaagacctctgaaaaggac

SEQ ID NO: 2844 - RNA, 20 nt, synthetic construct
  source 1..20: mol_type = other RNA
gacctctgaaaaggaccggc

SEQ ID NO: 2845 - RNA, 20 nt, synthetic construct
  source 1..20: mol_type = other RNA
acctctgaaaaggaccggca

SEQ ID NO: 2846 - RNA, 20 nt, synthetic construct
  source 1..20: mol_type = other RNA
agccgtggcaagagccctgc

SEQ ID NO: 2847 - RNA, 20 nt, synthetic construct
  source 1..20: mol_type = other RNA
gaccggcagggctcttgcca

SEQ ID NO: 2848 - RNA, 20 nt, synthetic construct
  source 1..20: mol_type = other RNA
ggcagggctcttgccacggc

SEQ ID NO: 2849 - RNA, 20 nt, synthetic construct
  source 1..20: mol_type = other RNA
gcagggctcttgccacggct

SEQ ID NO: 2850 - RNA, 20 nt, synthetic construct
  source 1..20: mol_type = other RNA
cagggctcttgccacggctg

SEQ ID NO: 2851 - RNA, 20 nt, synthetic construct
  source 1..20: mol_type = other RNA
catgaccacacccccagccg

SEQ ID NO: 2852 - RNA, 20 nt, synthetic construct
  source 1..20: mol_type = other RNA
agggctcttgccacggctgg

SEQ ID NO: 2853 - RNA, 20 nt, synthetic construct
  source 1..20: mol_type = other RNA
tcttgccacggctgggggtg

SEQ ID NO: 2854 - RNA, 20 nt, synthetic construct
  source 1..20: mol_type = other RNA
cacggctgggggtgtggtca

SEQ ID NO: 2855 - RNA, 20 nt, synthetic construct
  source 1..20: mol_type = other RNA
gggtgtggtcatggtaacac

SEQ ID NO: 2856 - RNA, 20 nt, synthetic construct
  source 1..20: mol_type = other RNA
taacacaggttttccatcca

SEQ ID NO: 2857 - RNA, 20 nt, synthetic construct
  source 1..20: mol_type = other RNA
cctcaggtaccttccatgga

SEQ ID NO: 2858 - RNA, 20 nt, synthetic construct
  source 1..20: mol_type = other RNA
acaggttttccatccatgga

SEQ ID NO: 2859 - RNA, 20 nt, synthetic construct
  source 1..20: mol_type = other RNA
aatccctcaggtaccttcca

SEQ ID NO: 2860 - RNA, 20 nt, synthetic construct
  source 1..20: mol_type = other RNA
ccatccatggaaggtacctg

SEQ ID NO: 2861 - RNA, 20 nt, synthetic construct
  source 1..20: mol_type = other RNA
catccatggaaggtacctga

SEQ ID NO: 2862 - RNA, 20 nt, synthetic construct
  source 1..20: mol_type = other RNA
ggaggaagagaaaatccctc

SEQ ID NO: 2863 - RNA, 20 nt, synthetic construct
  source 1..20: mol_type = other RNA
gggattttctcttcctccct

SEQ ID NO: 2864 - RNA, 20 nt, synthetic construct
  source 1..20: mol_type = other RNA
ggattttctcttcctcccta

SEQ ID NO: 2865 - RNA, 20 nt, synthetic construct
  source 1..20: mol_type = other RNA
ctctgatgctggccctaggg

SEQ ID NO: 2866 - RNA, 20 nt, synthetic construct
  source 1..20: mol_type = other RNA
ctcctctgatgctggcccta

SEQ ID NO: 2867 - RNA, 20 nt, synthetic construct
  source 1..20: mol_type = other RNA
actcctctgatgctggccct

SEQ ID NO: 2868 - RNA, 20 nt, synthetic construct
  source 1..20: mol_type = other RNA
gctattcactcctctgatgc

SEQ ID NO: 2869 - RNA, 20 nt, synthetic construct
  source 1..20: mol_type = other RNA
ctccctagggccagcatcag

SEQ ID NO: 2870 - RNA, 20 nt, synthetic construct
  source 1..20: mol_type = other RNA
tagctcagttagctcatctc

SEQ ID NO: 2871 - RNA, 20 nt, synthetic construct
  source 1..20: mol_type = other RNA
agctcagttagctcatctca

SEQ ID NO: 2872 - RNA, 20 nt, synthetic construct
  source 1..20: mol_type = other RNA
gctcagttagctcatctcag

SEQ ID NO: 2873 - RNA, 20 nt, synthetic construct
  source 1..20: mol_type = other RNA
aaaccacctccgagggcaca

SEQ ID NO: 2874 - RNA, 20 nt, synthetic construct
  source 1..20: mol_type = other RNA
tctcaggggccatgtgccct

SEQ ID NO: 2875 - RNA, 20 nt, synthetic construct
  source 1..20: mol_type = other RNA
caggggccatgtgccctcgg

SEQ ID NO: 2876 - RNA, 20 nt, synthetic construct
  source 1..20: mol_type = other RNA
aagtggcaaaccacctccga

SEQ ID NO: 2877 - RNA, 20 nt, synthetic construct
  source 1..20: mol_type = other RNA
gggccatgtgccctcggagg

SEQ ID NO: 2878 - RNA, 20 nt, synthetic construct
  source 1..20: mol_type = other RNA
aaagtggcaaaccacctccg

SEQ ID NO: 2879 - RNA, 20 nt, synthetic construct
  source 1..20: mol_type = other RNA
gaggtggtttgccactttca

SEQ ID NO: 2880 - RNA, 20 nt, synthetic construct
  source 1..20: mol_type = other RNA
actcagtccaaccgtgaaag

SEQ ID NO: 2881 - RNA, 20 nt, synthetic construct
  source 1..20: mol_type = other RNA
tggtttgccactttcacggt

SEQ ID NO: 2882 - RNA, 20 nt, synthetic construct
  source 1..20: mol_type = other RNA
ctttcacggttggactgagt

SEQ ID NO: 2883 - RNA, 20 nt, synthetic construct
  source 1..20: mol_type = other RNA
agagaaacagagacccaccc

SEQ ID NO: 2884 - RNA, 20 nt, synthetic construct
  source 1..20: mol_type = other RNA
gagaaacagagacccaccca

SEQ ID NO: 2885 - RNA, 20 nt, synthetic construct
  source 1..20: mol_type = other RNA
agaaacagagacccacccag

SEQ ID NO: 2886 - RNA, 20 nt, synthetic construct
  source 1..20: mol_type = other RNA
gcttgtccccacccctgggt

SEQ ID NO: 2887 - RNA, 20 nt, synthetic construct
  source 1..20: mol_type = other RNA
agcttgtccccacccctggg

SEQ ID NO: 2888 - RNA, 20 nt, synthetic construct
  source 1..20: mol_type = other RNA
aacagagacccacccagggg

SEQ ID NO: 2889 - RNA, 20 nt, synthetic construct
  source 1..20: mol_type = other RNA
acagagacccacccaggggt

SEQ ID NO: 2890 - RNA, 20 nt, synthetic construct
  source 1..20: mol_type = other RNA
gggagcttgtccccacccct

SEQ ID NO: 2891 - RNA, 20 nt, synthetic construct
  source 1..20: mol_type = other RNA
cagagacccacccaggggtg

SEQ ID NO: 2892 - RNA, 20 nt, synthetic construct
  source 1..20: mol_type = other RNA
agggagcttgtccccacccc

SEQ ID NO: 2893 - RNA, 20 nt, synthetic construct
  source 1..20: mol_type = other RNA
tctgcaagtcctgagttgca

SEQ ID NO: 2894 - RNA, 20 nt, synthetic construct
  source 1..20: mol_type = other RNA
atctgcaagtcctgagttgc

SEQ ID NO: 2895 - RNA, 20 nt, synthetic construct
  source 1..20: mol_type = other RNA
ggacaagctccctgcaactc

SEQ ID NO: 2896 - RNA, 20 nt, synthetic construct
  source 1..20: mol_type = other RNA
ttgcagatcacttgcccaag

SEQ ID NO: 2897 - RNA, 20 nt, synthetic construct
  source 1..20: mol_type = other RNA
caggagctagggagccactt

SEQ ID NO: 2898 - RNA, 20 nt, synthetic construct
  source 1..20: mol_type = other RNA
ccaggagctagggagccact

SEQ ID NO: 2899 - RNA, 20 nt, synthetic construct
  source 1..20: mol_type = other RNA
gggccaggagccaggagcta

SEQ ID NO: 2900 - RNA, 20 nt, synthetic construct
  source 1..20: mol_type = other RNA
ccaagtggctccctagctcc

SEQ ID NO: 2901 - RNA, 20 nt, synthetic construct
  source 1..20: mol_type = other RNA
cgggccaggagccaggagct

SEQ ID NO: 2902 - RNA, 20 nt, synthetic construct
  source 1..20: mol_type = other RNA
gctccctagctcctggctcc

SEQ ID NO: 2903 - RNA, 20 nt, synthetic construct
  source 1..20: mol_type = other RNA
caggccccgggccaggagcc

SEQ ID NO: 2904 - RNA, 20 nt, synthetic construct
  source 1..20: mol_type = other RNA
ctagctcctggctcctggcc

SEQ ID NO: 2905 - RNA, 20 nt, synthetic construct
  source 1..20: mol_type = other RNA
tagctcctggctcctggccc

SEQ ID NO: 2906 - RNA, 20 nt, synthetic construct
  source 1..20: mol_type = other RNA
agctcctggctcctggcccg

SEQ ID NO: 2907 - RNA, 20 nt, synthetic construct
  source 1..20: mol_type = other RNA
agagtcccaggccccgggcc

SEQ ID NO: 2908 - RNA, 20 nt, synthetic construct
  source 1..20: mol_type = other RNA
ctggctcctggcccggggcc

SEQ ID NO: 2909 - RNA, 20 nt, synthetic construct
  source 1..20: mol_type = other RNA
cggggagagtcccaggcccc

SEQ ID NO: 2910 - RNA, 20 nt, synthetic construct
  source 1..20: mol_type = other RNA
tggctcctggcccggggcct

SEQ ID NO: 2911 - RNA, 20 nt, synthetic construct
  source 1..20: mol_type = other RNA
tcggggagagtcccaggccc

SEQ ID NO: 2912 - RNA, 20 nt, synthetic construct
  source 1..20: mol_type = other RNA
cccacttcggggagagtccc

SEQ ID NO: 2913 - RNA, 20 nt, synthetic construct
  source 1..20: mol_type = other RNA
gcctgggactctccccgaag

SEQ ID NO: 2914 - RNA, 20 nt, synthetic construct
  source 1..20: mol_type = other RNA
cctgggactctccccgaagt

SEQ ID NO: 2915 - RNA, 20 nt, synthetic construct
  source 1..20: mol_type = other RNA
cagtggccagccccacttcg

SEQ ID NO: 2916 - RNA, 20 nt, synthetic construct
  source 1..20: mol_type = other RNA
ctgggactctccccgaagtg

SEQ ID NO: 2917 - RNA, 20 nt, synthetic construct
  source 1..20: mol_type = other RNA
acagtggccagccccacttc

SEQ ID NO: 2918 - RNA, 20 nt, synthetic construct
  source 1..20: mol_type = other RNA
cacagtggccagccccactt

SEQ ID NO: 2919 - RNA, 20 nt, synthetic construct
  source 1..20: mol_type = other RNA
gactctccccgaagtggggc

SEQ ID NO: 2920 - RNA, 20 nt, synthetic construct
  source 1..20: mol_type = other RNA
aagtggggctggccactgtg

SEQ ID NO: 2921 - RNA, 20 nt, synthetic construct
  source 1..20: mol_type = other RNA
ctccagtcggttcctcacag

SEQ ID NO: 2922 - RNA, 20 nt, synthetic construct
  source 1..20: mol_type = other RNA
ggccactgtgaggaaccgac

SEQ ID NO: 2923 - RNA, 20 nt, synthetic construct
  source 1..20: mol_type = other RNA
cactgtgaggaaccgactgg

SEQ ID NO: 2924 - RNA, 20 nt, synthetic construct
  source 1..20: mol_type = other RNA
aagaggtccctgcctccagt

SEQ ID NO: 2925 - RNA, 20 nt, synthetic construct
  source 1..20: mol_type = other RNA
gtgaggaaccgactggaggc

SEQ ID NO: 2926 - RNA, 20 nt, synthetic construct
  source 1..20: mol_type = other RNA
tgaggaaccgactggaggca

SEQ ID NO: 2927 - RNA, 20 nt, synthetic construct
  source 1..20: mol_type = other RNA
gactggaggcagggacctct

SEQ ID NO: 2928 - RNA, 20 nt, synthetic construct
  source 1..20: mol_type = other RNA
aactgcctggggcatccaag

SEQ ID NO: 2929 - RNA, 20 nt, synthetic construct
  source 1..20: mol_type = other RNA
agggacctcttggatgcccc

SEQ ID NO: 2930 - RNA, 20 nt, synthetic construct
  source 1..20: mol_type = other RNA
agtggcatcccaactgcctg

SEQ ID NO: 2931 - RNA, 20 nt, synthetic construct
  source 1..20: mol_type = other RNA
aagtggcatcccaactgcct

SEQ ID NO: 2932 - RNA, 20 nt, synthetic construct
  source 1..20: mol_type = other RNA
tcttggatgccccaggcagt

SEQ ID NO: 2933 - RNA, 20 nt, synthetic construct
  source 1..20: mol_type = other RNA
gaagtggcatcccaactgcc

SEQ ID NO: 2934 - RNA, 20 nt, synthetic construct
  source 1..20: mol_type = other RNA
cttggatgccccaggcagtt

SEQ ID NO: 2935 - RNA, 20 nt, synthetic construct
  source 1..20: mol_type = other RNA
accacgtgctttatcagaag

SEQ ID NO: 2936 - RNA, 20 nt, synthetic construct
  source 1..20: mol_type = other RNA
gccacttctgataaagcacg

SEQ ID NO: 2937 - RNA, 20 nt, synthetic construct
  source 1..20: mol_type = other RNA
acttctgataaagcacgtgg

SEQ ID NO: 2938 - RNA, 20 nt, synthetic construct
  source 1..20: mol_type = other RNA
aagcacgtggtggccacagt

SEQ ID NO: 2939 - RNA, 20 nt, synthetic construct
  source 1..20: mol_type = other RNA
gagcaaccaagcacctactg

SEQ ID NO: 2940 - RNA, 20 nt, synthetic construct
  source 1..20: mol_type = other RNA
tggtggccacagtaggtgct

SEQ ID NO: 2941 - RNA, 20 nt, synthetic construct
  source 1..20: mol_type = other RNA
tgcttggttgctccacagcc

SEQ ID NO: 2942 - RNA, 20 nt, synthetic construct
  source 1..20: mol_type = other RNA
gctgagctcgggccaggctg

SEQ ID NO: 2943 - RNA, 20 nt, synthetic construct
  source 1..20: mol_type = other RNA
tgcagcgctgagctcgggcc

SEQ ID NO: 2944 - RNA, 20 nt, synthetic construct
  source 1..20: mol_type = other RNA
ctttctgcagcgctgagctc

SEQ ID NO: 2945 - RNA, 20 nt, synthetic construct
  source 1..20: mol_type = other RNA
tctttctgcagcgctgagct

SEQ ID NO: 2946 - RNA, 20 nt, synthetic construct
  source 1..20: mol_type = other RNA
cgctgcagaaagaaagtgaa

SEQ ID NO: 2947 - RNA, 20 nt, synthetic construct
  source 1..20: mol_type = other RNA
gctgcagaaagaaagtgaaa

SEQ ID NO: 2948 - RNA, 20 nt, synthetic construct
  source 1..20: mol_type = other RNA
gtgaaagggaaaaagaactg

SEQ ID NO: 2949 - RNA, 20 nt, synthetic construct
  source 1..20: mol_type = other RNA
tgaaagggaaaaagaactgc

SEQ ID NO: 2950 - RNA, 20 nt, synthetic construct
  source 1..20: mol_type = other RNA
gaaagggaaaaagaactgcg

SEQ ID NO: 2951 - RNA, 20 nt, synthetic construct
  source 1..20: mol_type = other RNA
agggaaaaagaactgcgggg

SEQ ID NO: 2952 - RNA, 20 nt, synthetic construct
  source 1..20: mol_type = other RNA
gaaaaagaactgcggggagg

SEQ ID NO: 2953 - RNA, 20 nt, synthetic construct
  source 1..20: mol_type = other RNA
aaaaagaactgcggggaggc

SEQ ID NO: 2954 - RNA, 20 nt, synthetic construct
  source 1..20: mol_type = other RNA
aaaagaactgcggggaggcg

SEQ ID NO: 2955 - RNA, 20 nt, synthetic construct
  source 1..20: mol_type = other RNA
agaactgcggggaggcgggg

SEQ ID NO: 2956 - RNA, 20 nt, synthetic construct
  source 1..20: mol_type = other RNA
ctgcggggaggcggggaggt

SEQ ID NO: 2957 - RNA, 20 nt, synthetic construct
  source 1..20: mol_type = other RNA
cggggaggtaggatgaccag

SEQ ID NO: 2958 - RNA, 20 nt, synthetic construct
  source 1..20: mol_type = other RNA
gtctgtggcagctcgtccgc

SEQ ID NO: 2959 - RNA, 20 nt, synthetic construct
  source 1..20: mol_type = other RNA
ctggggccgcggcaagtctg

SEQ ID NO: 2960 - RNA, 20 nt, synthetic construct
  source 1..20: mol_type = other RNA
gagctgccacagacttgccg

SEQ ID NO: 2961 - RNA, 20 nt, synthetic construct
  source 1..20: mol_type = other RNA
tcccgccagctctggggccg

SEQ ID NO: 2962 - RNA, 20 nt, synthetic construct
  source 1..20: mol_type = other RNA
acttgccgcggccccagagc

SEQ ID NO: 2963 - RNA, 20 nt, synthetic construct
  source 1..20: mol_type = other RNA
tctccctcccgccagctctg

SEQ ID NO: 2964 - RNA, 20 nt, synthetic construct
  source 1..20: mol_type = other RNA
ctctccctcccgccagctct

SEQ ID NO: 2965 - RNA, 20 nt, synthetic construct
  source 1..20: mol_type = other RNA
cctctccctcccgccagctc

SEQ ID NO: 2966 - RNA, 20 nt, synthetic construct
  source 1..20: mol_type = other RNA
tgccgcggccccagagctgg

SEQ ID NO: 2967 - RNA, 20 nt, synthetic construct
  source 1..20: mol_type = other RNA
gccgcggccccagagctggc

SEQ ID NO: 2968 - RNA, 20 nt, synthetic construct
  source 1..20: mol_type = other RNA
gcggccccagagctggcggg

SEQ ID NO: 2969 - RNA, 20 nt, synthetic construct
  source 1..20: mol_type = other RNA
cggccccagagctggcggga

SEQ ID NO: 2970 - RNA, 20 nt, synthetic construct
  source 1..20: mol_type = other RNA
ccagagctggcgggagggag

SEQ ID NO: 2971 - RNA, 20 nt, synthetic construct
  source 1..20: mol_type = other RNA
gctcccgcgcgcgctgctgg

SEQ ID NO: 2972 - RNA, 20 nt, synthetic construct
  source 1..20: mol_type = other RNA
cgggctcccgcgcgcgctgc

SEQ ID NO: 2973 - RNA, 20 nt, synthetic construct
  source 1..20: mol_type = other RNA
gaggccaccagcagcgcgcg

SEQ ID NO: 2974 - RNA, 20 nt, synthetic construct
  source 1..20: mol_type = other RNA
aggccaccagcagcgcgcgc

SEQ ID NO: 2975 - RNA, 20 nt, synthetic construct
  source 1..20: mol_type = other RNA
cagcagcgcgcgcgggagcc

SEQ ID NO: 2976 - RNA, 20 nt, synthetic construct
  source 1..20: mol_type = other RNA
agcagcgcgcgcgggagccc

SEQ ID NO: 2977 - RNA, 20 nt, synthetic construct
  source 1..20: mol_type = other RNA
gcagcgcgcgcgggagcccg

SEQ ID NO: 2978 - RNA, 20 nt, synthetic construct
  source 1..20: mol_type = other RNA
gtcacctaccgctgttcccc

SEQ ID NO: 2979 - RNA, 20 nt, synthetic construct
  source 1..20: mol_type = other RNA
ggtcacctaccgctgttccc

SEQ ID NO: 2980 - RNA, 20 nt, synthetic construct
  source 1..20: mol_type = other RNA
cgcgggagcccggggaacag

SEQ ID NO: 2981 - RNA, 20 nt, synthetic construct
  source 1..20: mol_type = other RNA
ggagcccggggaacagcggt

SEQ ID NO: 2982 - RNA, 20 nt, synthetic construct
  source 1..20: mol_type = other RNA
aggggttacagaggagactt

SEQ ID NO: 2983 - RNA, 20 nt, synthetic construct
  source 1..20: mol_type = other RNA
cccgaccttaggggttacag

SEQ ID NO: 2984 - RNA, 20 nt, synthetic construct
  source 1..20: mol_type = other RNA
agtctcctctgtaaccccta

SEQ ID NO: 2985 - RNA, 20 nt, synthetic construct
  source 1..20: mol_type = other RNA
gattctcagcccgaccttag

SEQ ID NO: 2986 - RNA, 20 nt, synthetic construct
  source 1..20: mol_type = other RNA
tcctctgtaacccctaaggt

SEQ ID NO: 2987 - RNA, 20 nt, synthetic construct
  source 1..20: mol_type = other RNA
cgattctcagcccgacctta

SEQ ID NO: 2988 - RNA, 20 nt, synthetic construct
  source 1..20: mol_type = other RNA
cctctgtaacccctaaggtc

SEQ ID NO: 2989 - RNA, 20 nt, synthetic construct
  source 1..20: mol_type = other RNA
tcgattctcagcccgacctt

SEQ ID NO: 2990 - RNA, 20 nt, synthetic construct
  source 1..20: mol_type = other RNA
taaggtcgggctgagaatcg

SEQ ID NO: 2991 - RNA, 20 nt, synthetic construct
  source 1..20: mol_type = other RNA
gagcaagtagctgacagtct

SEQ ID NO: 2992 - RNA, 20 nt, synthetic construct
  source 1..20: mol_type = other RNA
gactgtcagctacttgctca

SEQ ID NO: 2993 - RNA, 20 nt, synthetic construct
  source 1..20: mol_type = other RNA
tcaaggtcacacagcaagtc

SEQ ID NO: 2994 - RNA, 20 nt, synthetic construct
  source 1..20: mol_type = other RNA
caaggtcacacagcaagtct

SEQ ID NO: 2995 - RNA, 20 nt, synthetic construct
  source 1..20: mol_type = other RNA
ggtcacacagcaagtctggg

SEQ ID NO: 2996 - RNA, 20 nt, synthetic construct
  source 1..20: mol_type = other RNA
acacagcaagtctgggagga

SEQ ID NO: 2997 - RNA, 20 nt, synthetic construct
  source 1..20: mol_type = other RNA
cacagcaagtctgggaggat

SEQ ID NO: 2998 - RNA, 20 nt, synthetic construct
  source 1..20: mol_type = other RNA
acagcaagtctgggaggatg

SEQ ID NO: 2999 - RNA, 20 nt, synthetic construct
  source 1..20: mol_type = other RNA
cagcaagtctgggaggatgg

SEQ ID NO: 3000 - RNA, 20 nt, synthetic construct
  source 1..20: mol_type = other RNA
agcaagtctgggaggatggg

SEQ ID NO: 3001 - RNA, 20 nt, synthetic construct
  source 1..20: mol_type = other RNA
agtctgggaggatgggggga

SEQ ID NO: 3002 - RNA, 20 nt, synthetic construct
  source 1..20: mol_type = other RNA
ggatggaatatgcaaaatgt

SEQ ID NO: 3003 - RNA, 20 nt, synthetic construct
  source 1..20: mol_type = other RNA
gatggaatatgcaaaatgta

SEQ ID NO: 3004 - RNA, 20 nt, synthetic construct
  source 1..20: mol_type = other RNA
gaatatgcaaaatgtagggc

SEQ ID NO: 3005 - RNA, 20 nt, synthetic construct
  source 1..20: mol_type = other RNA
aatatgcaaaatgtagggcc

SEQ ID NO: 3006 - RNA, 20 nt, synthetic construct
  source 1..20: mol_type = other RNA
gctggaaacgaggtgtttcc

SEQ ID NO: 3007 - RNA, 20 nt, synthetic construct
  source 1..20: mol_type = other RNA
ttgcggggatgctggaaacg

SEQ ID NO: 3008 - RNA, 20 nt, synthetic construct
  source 1..20: mol_type = other RNA
cagagtcgttgcggggatgc

SEQ ID NO: 3009 - RNA, 20 nt, synthetic construct
  source 1..20: mol_type = other RNA
tcccgcgcagagtcgttgcg

SEQ ID NO: 3010 - RNA, 20 nt, synthetic construct
  source 1..20: mol_type = other RNA
ttcccgcgcagagtcgttgc

SEQ ID NO: 3011 - RNA, 20 nt, synthetic construct
  source 1..20: mol_type = other RNA
gttcccgcgcagagtcgttg

SEQ ID NO: 3012 - RNA, 20 nt, synthetic construct
  source 1..20: mol_type = other RNA
atccccgcaacgactctgcg

SEQ ID NO: 3013 - RNA, 20 nt, synthetic construct
  source 1..20: mol_type = other RNA
tccccgcaacgactctgcgc

SEQ ID NO: 3014 - RNA, 20 nt, synthetic construct
  source 1..20: mol_type = other RNA
aacgactctgcgcgggaacc

SEQ ID NO: 3015 - RNA, 20 nt, synthetic construct
  source 1..20: mol_type = other RNA
tctgcgcgggaaccaggagc

SEQ ID NO: 3016 - RNA, 20 nt, synthetic construct
  source 1..20: mol_type = other RNA
ctgcgcgggaaccaggagcc

SEQ ID NO: 3017 - RNA, 20 nt, synthetic construct
  source 1..20: mol_type = other RNA
agctccgggttcccggctcc

SEQ ID NO: 3018 - RNA, 20 nt, synthetic construct
  source 1..20: mol_type = other RNA
ggaaccaggagccgggaacc

SEQ ID NO: 3019 - RNA, 20 nt, synthetic construct
  source 1..20: mol_type = other RNA
caagccaagctccgggttcc

SEQ ID NO: 3020 - RNA, 20 nt, synthetic construct
  source 1..20: mol_type = other RNA
ggagccgggaacccggagct

SEQ ID NO: 3021 - RNA, 20 nt, synthetic construct
  source 1..20: mol_type = other RNA
ggcacagcaagccaagctcc

SEQ ID NO: 3022 - RNA, 20 nt, synthetic construct
  source 1..20: mol_type = other RNA
gggcacagcaagccaagctc

SEQ ID NO: 3023 - RNA, 20 nt, synthetic construct
  source 1..20: mol_type = other RNA
gcccacggccccggagctct

SEQ ID NO: 3024 - RNA, 20 nt, synthetic construct
  source 1..20: mol_type = other RNA
gcttgctgtgcccagagctc

SEQ ID NO: 3025 - RNA, 20 nt, synthetic construct
  source 1..20: mol_type = other RNA
cgcccacggccccggagctc

SEQ ID NO: 3026 - RNA, 20 nt, synthetic construct
  source 1..20: mol_type = other RNA
cttgctgtgcccagagctcc

SEQ ID NO: 3027 - RNA, 20 nt, synthetic construct
  source 1..20: mol_type = other RNA
ttgctgtgcccagagctccg

SEQ ID NO: 3028 - RNA, 20 nt, synthetic construct
  source 1..20: mol_type = other RNA
tgcccagagctccggggccg

SEQ ID NO: 3029 - RNA, 20 nt, synthetic construct
  source 1..20: mol_type = other RNA
ctgccacccgcccacggccc

SEQ ID NO: 3030 - RNA, 20 nt, synthetic construct
  source 1..20: mol_type = other RNA
gcccagagctccggggccgt

SEQ ID NO: 3031 - RNA, 20 nt, synthetic construct
  source 1..20: mol_type = other RNA
cagagctccggggccgtggg

SEQ ID NO: 3032 - RNA, 20 nt, synthetic construct
  source 1..20: mol_type = other RNA
agagctccggggccgtgggc

SEQ ID NO: 3033 - RNA, 20 nt, synthetic construct
  source 1..20: mol_type = other RNA
gctttcctgccacccgccca

SEQ ID NO: 3034 - RNA, 20 nt, synthetic construct
  source 1..20: mol_type = other RNA
gctccggggccgtgggcggg

SEQ ID NO: 3035 - RNA, 20 nt, synthetic construct
  source 1..20: mol_type = other RNA
cggggccgtgggcgggtggc

SEQ ID NO: 3036 - RNA, 20 nt, synthetic construct
  source 1..20: mol_type = other RNA
gggcgggtggcaggaaagcc

SEQ ID NO: 3037 - RNA, 20 nt, synthetic construct
  source 1..20: mol_type = other RNA
cgggtggcaggaaagcctgg

SEQ ID NO: 3038 - RNA, 20 nt, synthetic construct
  source 1..20: mol_type = other RNA
tctctgcagaagctgccgcc

SEQ ID NO: 3039 - RNA, 20 nt, synthetic construct
  source 1..20: mol_type = other RNA
ggcagcttctgcagagaagc

SEQ ID NO: 3040 - RNA, 20 nt, synthetic construct
  source 1..20: mol_type = other RNA
cgcgctcccagtctgcgctc

SEQ ID NO: 3041 - RNA, 20 nt, synthetic construct
  source 1..20: mol_type = other RNA
agagaagccggagcgcagac

SEQ ID NO: 3042 - RNA, 20 nt, synthetic construct
  source 1..20: mol_type = other RNA
gagaagccggagcgcagact

SEQ ID NO: 3043 - RNA, 20 nt, synthetic construct
  source 1..20: mol_type = other RNA
cggagcgcagactgggagcg

SEQ ID NO: 3044 - RNA, 20 nt, synthetic construct
  source 1..20: mol_type = other RNA
gcggagcagacacactcccc

SEQ ID NO: 3045 - RNA, 20 nt, synthetic construct
  source 1..20: mol_type = other RNA
agtcggccaagggtggccgg

SEQ ID NO: 3046 - RNA, 20 nt, synthetic construct
  source 1..20: mol_type = other RNA
gagtcggccaagggtggccg

SEQ ID NO: 3047 - RNA, 20 nt, synthetic construct
  source 1..20: mol_type = other RNA
ggagtcggccaagggtggcc

SEQ ID NO: 3048 - RNA, 20 nt, synthetic construct
  source 1..20: mol_type = other RNA
cggagtcggccaagggtggc

SEQ ID NO: 3049 - RNA, 20 nt, synthetic construct
  source 1..20: mol_type = other RNA
cacactcccccggccaccct

SEQ ID NO: 3050 - RNA, 20 nt, synthetic construct
  source 1..20: mol_type = other RNA
cgcgcggagtcggccaaggg

SEQ ID NO: 3051 - RNA, 20 nt, synthetic construct
  source 1..20: mol_type = other RNA
gggcgcgcggagtcggccaa

SEQ ID NO: 3052 - RNA, 20 nt, synthetic construct
  source 1..20: mol_type = other RNA
cgggcgcgcggagtcggcca

SEQ ID NO: 3053 - RNA, 20 nt, synthetic construct
  source 1..20: mol_type = other RNA
ggatcccgggcgcgcggagt

SEQ ID NO: 3054 - RNA, 20 nt, synthetic construct
  source 1..20: mol_type = other RNA
cttggccgactccgcgcgcc

SEQ ID NO: 3055 - RNA, 20 nt, synthetic construct
  source 1..20: mol_type = other RNA
tctgcaggatcccgggcgcg

SEQ ID NO: 3056 - RNA, 20 nt, synthetic construct
  source 1..20: mol_type = other RNA
ttggccgactccgcgcgccc

SEQ ID NO: 3057 - RNA, 20 nt, synthetic construct
  source 1..20: mol_type = other RNA
gcgcacctctgcaggatccc

SEQ ID NO: 3058 - RNA, 20 nt, synthetic construct
  source 1..20: mol_type = other RNA
cgcgcacctctgcaggatcc

SEQ ID NO: 3059 - RNA, 20 nt, synthetic construct
  source 1..20: mol_type = other RNA
gcgcgcccgggatcctgcag

SEQ ID NO: 3060 - RNA, 20 nt, synthetic construct
  source 1..20: mol_type = other RNA
agaagggcgcgcacctctgc

SEQ ID NO: 3061 - RNA, 20 nt, synthetic construct
  source 1..20: mol_type = other RNA
caaagtctggcgtacaagaa

SEQ ID NO: 3062 - RNA, 20 nt, synthetic construct
  source 1..20: mol_type = other RNA
ccaaagtctggcgtacaaga

SEQ ID NO: 3063 - RNA, 20 nt, synthetic construct
  source 1..20: mol_type = other RNA
ccttcttgtacgccagactt

SEQ ID NO: 3064 - RNA, 20 nt, synthetic construct
  source 1..20: mol_type = other RNA
ggcggccctggtccaaagtc

SEQ ID NO: 3065 - RNA, 20 nt, synthetic construct
  source 1..20: mol_type = other RNA
tgtacgccagactttggacc

SEQ ID NO: 3066 - RNA, 20 nt, synthetic construct
  source 1..20: mol_type = other RNA
gtacgccagactttggacca

SEQ ID NO: 3067 - RNA, 20 nt, synthetic construct
  source 1..20: mol_type = other RNA
agctcagggaacggcggccc

SEQ ID NO: 3068 - RNA, 20 nt, synthetic construct
  source 1..20: mol_type = other RNA
aagtgaagctcagggaacgg

SEQ ID NO: 3069 - RNA, 20 nt, synthetic construct
  source 1..20: mol_type = other RNA
ggaaagtgaagctcagggaa

SEQ ID NO: 3070 - RNA, 20 nt, synthetic construct
  source 1..20: mol_type = other RNA
aacagggaaagtgaagctca

SEQ ID NO: 3071 - RNA, 20 nt, synthetic construct
  source 1..20: mol_type = other RNA
caacagggaaagtgaagctc

SEQ ID NO: 3072 - RNA, 20 nt, synthetic construct
  source 1..20: mol_type = other RNA
ctgagcttcactttccctgt

SEQ ID NO: 3073 - RNA, 20 nt, synthetic construct
  source 1..20: mol_type = other RNA
tgagcttcactttccctgtt

SEQ ID NO: 3074 - RNA, 20 nt, synthetic construct
  source 1..20: mol_type = other RNA
agatggaatatgacccaaca

SEQ ID NO: 3075 - RNA, 20 nt, synthetic construct
  source 1..20: mol_type = other RNA
gagatggaatatgacccaac

SEQ ID NO: 3076 - RNA, 20 nt, synthetic construct
  source 1..20: mol_type = other RNA
caagattccagagttagaga

SEQ ID NO: 3077 - RNA, 20 nt, synthetic construct
  source 1..20: mol_type = other RNA
tcatattccatctctaactc

SEQ ID NO: 3078 - RNA, 20 nt, synthetic construct
  source 1..20: mol_type = other RNA
catctctaactctggaatct

SEQ ID NO: 3079 - RNA, 20 nt, synthetic construct
  source 1..20: mol_type = other RNA
atctctaactctggaatctt

SEQ ID NO: 3080 - RNA, 20 nt, synthetic construct
  source 1..20: mol_type = other RNA
aactctggaatcttgggtat

SEQ ID NO: 3081 - RNA, 20 nt, synthetic construct
  source 1..20: mol_type = other RNA
actctggaatcttgggtatt

SEQ ID NO: 3082 - RNA, 20 nt, synthetic construct
  source 1..20: mol_type = other RNA
tcttgggtattgggctctcc

SEQ ID NO: 3083 - RNA, 20 nt, synthetic construct
  source 1..20: mol_type = other RNA
tgggtattgggctctccagg

SEQ ID NO: 3084 - RNA, 20 nt, synthetic construct
  source 1..20: mol_type = other RNA
gggtattgggctctccaggc

SEQ ID NO: 3085 - RNA, 20 nt, synthetic construct
  source 1..20: mol_type = other RNA
ggtattgggctctccaggcg

SEQ ID NO: 3086 - RNA, 20 nt, synthetic construct
  source 1..20: mol_type = other RNA
gtattgggctctccaggcgg

SEQ ID NO: 3087 - RNA, 20 nt, synthetic construct
  source 1..20: mol_type = other RNA
tattgggctctccaggcggg

SEQ ID NO: 3088 - RNA, 20 nt, synthetic construct
  source 1..20: mol_type = other RNA
cctgagcagggccccccgcc

SEQ ID NO: 3089 - RNA, 20 nt, synthetic construct
  source 1..20: mol_type = other RNA
ccaggcggggggccctgctc

SEQ ID NO: 3090 - RNA, 20 nt, synthetic construct
  source 1..20: mol_type = other RNA
caggcggggggccctgctca

SEQ ID NO: 3091 - RNA, 20 nt, synthetic construct
  source 1..20: mol_type = other RNA
ccctactgcctccctgagca

SEQ ID NO: 3092 - RNA, 20 nt, synthetic construct
  source 1..20: mol_type = other RNA
tccctactgcctccctgagc

SEQ ID NO: 3093 - RNA, 20 nt, synthetic construct
  source 1..20: mol_type = other RNA
gcggggggccctgctcaggg

SEQ ID NO: 3094 - RNA, 20 nt, synthetic construct
  source 1..20: mol_type = other RNA
gccctgctcagggaggcagt

SEQ ID NO: 3095 - RNA, 20 nt, synthetic construct
  source 1..20: mol_type = other RNA
ccctgctcagggaggcagta

SEQ ID NO: 3096 - RNA, 20 nt, synthetic construct
  source 1..20: mol_type = other RNA
ccatcctctggttaaaggtt

SEQ ID NO: 3097 - RNA, 20 nt, synthetic construct
  source 1..20: mol_type = other RNA
ttatcccatcctctggttaa

SEQ ID NO: 3098 - RNA, 20 nt, synthetic construct
  source 1..20: mol_type = other RNA
ggagccaaacctttaaccag

SEQ ID NO: 3099 - RNA, 20 nt, synthetic construct
  source 1..20: mol_type = other RNA
ccaaacctttaaccagagga

SEQ ID NO: 3100 - RNA, 20 nt, synthetic construct
  source 1..20: mol_type = other RNA
caaacctttaaccagaggat

SEQ ID NO: 3101 - RNA, 20 nt, synthetic construct
  source 1..20: mol_type = other RNA
tgaggacttatcccatcctc

SEQ ID NO: 3102 - RNA, 20 nt, synthetic construct
  source 1..20: mol_type = other RNA
aagatgttcaacgagagttg

SEQ ID NO: 3103 - RNA, 20 nt, synthetic construct
  source 1..20: mol_type = other RNA
tcaactctcgttgaacatct

SEQ ID NO: 3104 - RNA, 20 nt, synthetic construct
  source 1..20: mol_type = other RNA
ctcgttgaacatcttggcga

SEQ ID NO: 3105 - RNA, 20 nt, synthetic construct
  source 1..20: mol_type = other RNA
ttggcgaaggtgtgtgttgt

SEQ ID NO: 3106 - RNA, 20 nt, synthetic construct
  source 1..20: mol_type = other RNA
tggcgaaggtgtgtgttgtt

SEQ ID NO: 3107 - RNA, 20 nt, synthetic construct
  source 1..20: mol_type = other RNA
cgaaggtgtgtgttgttggg

SEQ ID NO: 3108 - RNA, 20 nt, synthetic construct
  source 1..20: mol_type = other RNA
gaaggtgtgtgttgttggga

SEQ ID NO: 3109 - RNA, 20 nt, synthetic construct
  source 1..20: mol_type = other RNA
aaggtgtgtgttgttgggag

SEQ ID NO: 3110 - RNA, 20 nt, synthetic construct
  source 1..20: mol_type = other RNA
gtgtgtgttgttgggagggg

SEQ ID NO: 3111 - RNA, 20 nt, synthetic construct
  source 1..20: mol_type = other RNA
tgtgtgttgttgggaggggt

SEQ ID NO: 3112 - RNA, 20 nt, synthetic construct
  source 1..20: mol_type = other RNA
gtgtgttgttgggaggggtg

SEQ ID NO: 3113 - RNA, 20 nt, synthetic construct
  source 1..20: mol_type = other RNA
tgtgttgttgggaggggtgg

SEQ ID NO: 3114 - RNA, 20 nt, synthetic construct
  source 1..20: mol_type = other RNA
gttgttgggaggggtggggg

SEQ ID NO: 3115 - RNA, 20 nt, synthetic construct
  source 1..20: mol_type = other RNA
ttgttgggaggggtggggga

SEQ ID NO: 3116 - RNA, 20 nt, synthetic construct
  source 1..20: mol_type = other RNA
gggtgggggagggatccccc

SEQ ID NO: 3117 - RNA, 20 nt, synthetic construct
  source 1..20: mol_type = other RNA
agagatcggttcagtccggg

SEQ ID NO: 3118 - RNA, 20 nt, synthetic construct
  source 1..20: mol_type = other RNA
aagagatcggttcagtccgg

SEQ ID NO: 3119 - RNA, 20 nt, synthetic construct
  source 1..20: mol_type = other RNA
caagagatcggttcagtccg

SEQ ID NO: 3120 - RNA, 20 nt, synthetic construct
  source 1..20: mol_type = other RNA
tcaagagatcggttcagtcc

SEQ ID NO: 3121 - RNA, 20 nt, synthetic construct
  source 1..20: mol_type = other RNA
atcaagagatcggttcagtc

SEQ ID NO: 3122 - RNA, 20 nt, synthetic construct
  source 1..20: mol_type = other RNA
gaagtgagagatcaagagat

SEQ ID NO: 3123 - RNA, 20 nt, synthetic construct
  source 1..20: mol_type = other RNA
ctcacttctctacctcgctt

SEQ ID NO: 3124 - RNA, 20 nt, synthetic construct
  source 1..20: mol_type = other RNA
tcacttctctacctcgcttt

SEQ ID NO: 3125 - RNA, 20 nt, synthetic construct
  source 1..20: mol_type = other RNA
tgactcagggccccaaagcg

SEQ ID NO: 3126 - RNA, 20 nt, synthetic construct
  source 1..20: mol_type = other RNA
cacttctctacctcgctttg

SEQ ID NO: 3127 - RNA, 20 nt, synthetic construct
  source 1..20: mol_type = other RNA
tccttagagggtgtgactca

SEQ ID NO: 3128 - RNA, 20 nt, synthetic construct
  source 1..20: mol_type = other RNA
ctccttagagggtgtgactc

SEQ ID NO: 3129 - RNA, 20 nt, synthetic construct
  source 1..20: mol_type = other RNA
gccctgagtcacaccctcta

SEQ ID NO: 3130 - RNA, 20 nt, synthetic construct
  source 1..20: mol_type = other RNA
ctttagcctctctccttaga

SEQ ID NO: 3131 - RNA, 20 nt, synthetic construct
  source 1..20: mol_type = other RNA
gctttagcctctctccttag

SEQ ID NO: 3132 - RNA, 20 nt, synthetic construct
  source 1..20: mol_type = other RNA
gtcacaccctctaaggagag

SEQ ID NO: 3133 - RNA, 20 nt, synthetic construct
  source 1..20: mol_type = other RNA
ggagagaggctaaagcgccc

SEQ ID NO: 3134 - RNA, 20 nt, synthetic construct
  source 1..20: mol_type = other RNA
attcgcacgctggctttccg

SEQ ID NO: 3135 - RNA, 20 nt, synthetic construct
  source 1..20: mol_type = other RNA
cattcgcacgctggctttcc

SEQ ID NO: 3136 - RNA, 20 nt, synthetic construct
  source 1..20: mol_type = other RNA
gcattcgcacgctggctttc

SEQ ID NO: 3137 - RNA, 20 nt, synthetic construct
  source 1..20: mol_type = other RNA
ccaccccggcattcgcacgc

SEQ ID NO: 3138 - RNA, 20 nt, synthetic construct
  source 1..20: mol_type = other RNA
gaaagccagcgtgcgaatgc

SEQ ID NO: 3139 - RNA, 20 nt, synthetic construct
  source 1..20: mol_type = other RNA
aaagccagcgtgcgaatgcc

SEQ ID NO: 3140 - RNA, 20 nt, synthetic construct
  source 1..20: mol_type = other RNA
aagccagcgtgcgaatgccg

SEQ ID NO: 3141 - RNA, 20 nt, synthetic construct
  source 1..20: mol_type = other RNA
ccagcgtgcgaatgccgggg

SEQ ID NO: 3142 - RNA, 20 nt, synthetic construct
  source 1..20: mol_type = other RNA
cagcgtgcgaatgccggggt

SEQ ID NO: 3143 - RNA, 20 nt, synthetic construct
  source 1..20: mol_type = other RNA
ccaatctcccactcccaccc

SEQ ID NO: 3144 - RNA, 20 nt, synthetic construct
  source 1..20: mol_type = other RNA
tgcgaatgccggggtgggag

SEQ ID NO: 3145 - RNA, 20 nt, synthetic construct
  source 1..20: mol_type = other RNA
gcgaatgccggggtgggagt

SEQ ID NO: 3146 - RNA, 20 nt, synthetic construct
  source 1..20: mol_type = other RNA
ccggggtgggagtgggagat

SEQ ID NO: 3147 - RNA, 20 nt, synthetic construct
  source 1..20: mol_type = other RNA
agtgggagattggatctccc

SEQ ID NO: 3148 - RNA, 20 nt, synthetic construct
  source 1..20: mol_type = other RNA
gtgggagattggatctccct

SEQ ID NO: 3149 - RNA, 20 nt, synthetic construct
  source 1..20: mol_type = other RNA
tgggagattggatctccctg

SEQ ID NO: 3150 - RNA, 20 nt, synthetic construct
  source 1..20: mol_type = other RNA
tccggctttcctggacccca

SEQ ID NO: 3151 - RNA, 20 nt, synthetic construct
  source 1..20: mol_type = other RNA
ttccggctttcctggacccc

SEQ ID NO: 3152 - RNA, 20 nt, synthetic construct
  source 1..20: mol_type = other RNA
attggatctccctggggtcc

SEQ ID NO: 3153 - RNA, 20 nt, synthetic construct
  source 1..20: mol_type = other RNA
ggctccgattccggctttcc

SEQ ID NO: 3154 - RNA, 20 nt, synthetic construct
  source 1..20: mol_type = other RNA
tccctggggtccaggaaagc

SEQ ID NO: 3155 - RNA, 20 nt, synthetic construct
  source 1..20: mol_type = other RNA
gggtccaggaaagccggaat

SEQ ID NO: 3156 - RNA, 20 nt, synthetic construct
  source 1..20: mol_type = other RNA
aagcatggtggctccgattc

SEQ ID NO: 3157 - RNA, 20 nt, synthetic construct
  source 1..20: mol_type = other RNA
ccagactaagctaagcatgg

SEQ ID NO: 3158 - RNA, 20 nt, synthetic construct
  source 1..20: mol_type = other RNA
gttccagactaagctaagca

SEQ ID NO: 3159 - RNA, 20 nt, synthetic construct
  source 1..20: mol_type = other RNA
ccaccatgcttagcttagtc

SEQ ID NO: 3160 - RNA, 20 nt, synthetic construct
  source 1..20: mol_type = other RNA
tctggaactcttaaaagccg

SEQ ID NO: 3161 - RNA, 20 nt, synthetic construct
  source 1..20: mol_type = other RNA
tgtgggactcaggaggaccg

SEQ ID NO: 3162 - RNA, 20 nt, synthetic construct
  source 1..20: mol_type = other RNA
gaggggctgtgggactcagg

SEQ ID NO: 3163 - RNA, 20 nt, synthetic construct
  source 1..20: mol_type = other RNA
ggagaggggctgtgggactc

SEQ ID NO: 3164 - RNA, 20 nt, synthetic construct
  source 1..20: mol_type = other RNA
ctagggtggagaggggctgt

SEQ ID NO: 3165 - RNA, 20 nt, synthetic construct
  source 1..20: mol_type = other RNA
cctagggtggagaggggctg

SEQ ID NO: 3166 - RNA, 20 nt, synthetic construct
  source 1..20: mol_type = other RNA
gtgccacctagggtggagag

SEQ ID NO: 3167 - RNA, 20 nt, synthetic construct
  source 1..20: mol_type = other RNA
tgtgccacctagggtggaga

SEQ ID NO: 3168 - RNA, 20 nt, synthetic construct
  source 1..20: mol_type = other RNA
ctgtgccacctagggtggag

SEQ ID NO: 3169 - RNA, 20 nt, synthetic construct
  source 1..20: mol_type = other RNA
ccacagcccctctccaccct

SEQ ID NO: 3170 - RNA, 20 nt, synthetic construct
  source 1..20: mol_type = other RNA
ctctcctgtgccacctaggg

SEQ ID NO: 3171 - RNA, 20 nt, synthetic construct
  source 1..20: mol_type = other RNA
cagcccctctccaccctagg

SEQ ID NO: 3172 - RNA, 20 nt, synthetic construct
  source 1..20: mol_type = other RNA
cacctctcctgtgccaccta

SEQ ID NO: 3173 - RNA, 20 nt, synthetic construct
  source 1..20: mol_type = other RNA
ccacctctcctgtgccacct

SEQ ID NO: 3174 - RNA, 20 nt, synthetic construct
  source 1..20: mol_type = other RNA
ctctccaccctaggtggcac

SEQ ID NO: 3175 - RNA, 20 nt, synthetic construct
  source 1..20: mol_type = other RNA
caccctaggtggcacaggag

SEQ ID NO: 3176 - RNA, 20 nt, synthetic construct
  source 1..20: mol_type = other RNA
cctaggtggcacaggagagg

SEQ ID NO: 3177 - RNA, 20 nt, synthetic construct
  source 1..20: mol_type = other RNA
gagccatgccttgaacttct

SEQ ID NO: 3178 - RNA, 20 nt, synthetic construct
  source 1..20: mol_type = other RNA
ggcaaaagcctagaagttca

SEQ ID NO: 3179 - RNA, 20 nt, synthetic construct
  source 1..20: mol_type = other RNA
aagcctagaagttcaaggca

SEQ ID NO: 3180 - RNA, 20 nt, synthetic construct
  source 1..20: mol_type = other RNA
ctccaggctgcggctgggga

SEQ ID NO: 3181 - RNA, 20 nt, synthetic construct
  source 1..20: mol_type = other RNA
actccaggctgcggctgggg

SEQ ID NO: 3182 - RNA, 20 nt, synthetic construct
  source 1..20: mol_type = other RNA
gacactccaggctgcggctg

SEQ ID NO: 3183 - RNA, 20 nt, synthetic construct
  source 1..20: mol_type = other RNA
agacactccaggctgcggct

SEQ ID NO: 3184 - RNA, 20 nt, synthetic construct
  source 1..20: mol_type = other RNA
tagacactccaggctgcggc

SEQ ID NO: 3185 - RNA, 20 nt, synthetic construct
  source 1..20: mol_type = other RNA
ctccctccccagccgcagcc

SEQ ID NO: 3186 - RNA, 20 nt, synthetic construct
  source 1..20: mol_type = other RNA
aagttagacactccaggctg

SEQ ID NO: 3187 - RNA, 20 nt, synthetic construct
  source 1..20: mol_type = other RNA
ctgccaaagttagacactcc

SEQ ID NO: 3188 - RNA, 20 nt, synthetic construct
  source 1..20: mol_type = other RNA
cagcctggagtgtctaactt

SEQ ID NO: 3189 - RNA, 20 nt, synthetic construct
  source 1..20: mol_type = other RNA
ctggagtgtctaactttggc

SEQ ID NO: 3190 - RNA, 20 nt, synthetic construct
  source 1..20: mol_type = other RNA
tctggagtggggagcagaaa

SEQ ID NO: 3191 - RNA, 20 nt, synthetic construct
  source 1..20: mol_type = other RNA
tttattttttctctggagtg

SEQ ID NO: 3192 - RNA, 20 nt, synthetic construct
  source 1..20: mol_type = other RNA
atttattttttctctggagt

SEQ ID NO: 3193 - RNA, 20 nt, synthetic construct
  source 1..20: mol_type = other RNA
tatttattttttctctggag

SEQ ID NO: 3194 - RNA, 20 nt, synthetic construct
  source 1..20: mol_type = other RNA
gtatttatttattttttctc

SEQ ID NO: 3195 - RNA, 20 nt, synthetic construct
  source 1..20: mol_type = other RNA
aaaataaataaatacttctc

SEQ ID NO: 3196 - RNA, 20 nt, synthetic construct
  source 1..20: mol_type = other RNA
ctgtttccttaatctcactc

SEQ ID NO: 3197 - RNA, 20 nt, synthetic construct
  source 1..20: mol_type = other RNA
acttctccggagtgagatta

SEQ ID NO: 3198 - RNA, 20 nt, synthetic construct
  source 1..20: mol_type = other RNA
cggagtgagattaaggaaac

SEQ ID NO: 3199 - RNA, 20 nt, synthetic construct
  source 1..20: mol_type = other RNA
aaacaggtacttcttcctct

SEQ ID NO: 3200 - RNA, 20 nt, synthetic construct
  source 1..20: mol_type = other RNA
ttggctcctctttctccaag

SEQ ID NO: 3201 - RNA, 20 nt, synthetic construct
  source 1..20: mol_type = other RNA
cttcttcctcttggagaaag

SEQ ID NO: 3202 - RNA, 20 nt, synthetic construct
  source 1..20: mol_type = other RNA
cttggagaaagaggagccaa

SEQ ID NO: 3203 - RNA, 20 nt, synthetic construct
  source 1..20: mol_type = other RNA
ttgttggagtcaagttcctt

SEQ ID NO: 3204 - RNA, 20 nt, synthetic construct
  source 1..20: mol_type = other RNA
tttgcaaggtgatcatttgt

SEQ ID NO: 3205 - RNA, 20 nt, synthetic construct
  source 1..20: mol_type = other RNA
aagggagccgggggtttgca

SEQ ID NO: 3206 - RNA, 20 nt, synthetic construct
  source 1..20: mol_type = other RNA
atgatcaccttgcaaacccc

SEQ ID NO: 3207 - RNA, 20 nt, synthetic construct
  source 1..20: mol_type = other RNA
tcatcccctaagggagccgg

SEQ ID NO: 3208 - RNA, 20 nt, synthetic construct
  source 1..20: mol_type = other RNA
gtcatcccctaagggagccg

SEQ ID NO: 3209 - RNA, 20 nt, synthetic construct
  source 1..20: mol_type = other RNA
ggtcatcccctaagggagcc

SEQ ID NO: 3210 - RNA, 20 nt, synthetic construct
  source 1..20: mol_type = other RNA
aggtcatcccctaagggagc

SEQ ID NO: 3211 - RNA, 20 nt, synthetic construct
  source 1..20: mol_type = other RNA
tgcaaacccccggctccctt

SEQ ID NO: 3212 - RNA, 20 nt, synthetic construct
  source 1..20: mol_type = other RNA
gcaaacccccggctccctta

SEQ ID NO: 3213 - RNA, 20 nt, synthetic construct
  source 1..20: mol_type = other RNA
caaacccccggctcccttag

SEQ ID NO: 3214 - RNA, 20 nt, synthetic construct
  source 1..20: mol_type = other RNA
gagaccaggtcatcccctaa

SEQ ID NO: 3215 - RNA, 20 nt, synthetic construct
  source 1..20: mol_type = other RNA
ggagaccaggtcatccccta

SEQ ID NO: 3216 - RNA, 20 nt, synthetic construct
  source 1..20: mol_type = other RNA
ggctcccttaggggatgacc

SEQ ID NO: 3217 - RNA, 20 nt, synthetic construct
  source 1..20: mol_type = other RNA
ctctgagattgttggagacc

SEQ ID NO: 3218 - RNA, 20 nt, synthetic construct
  source 1..20: mol_type = other RNA
tccaaacgctctgagattgt

SEQ ID NO: 3219 - RNA, 20 nt, synthetic construct
  source 1..20: mol_type = other RNA
tccaacaatctcagagcgtt

SEQ ID NO: 3220 - RNA, 20 nt, synthetic construct
  source 1..20: mol_type = other RNA
aacaatctcagagcgtttgg

SEQ ID NO: 3221 - RNA, 20 nt, synthetic construct
  source 1..20: mol_type = other RNA
atctcagagcgtttggaggc

SEQ ID NO: 3222 - RNA, 20 nt, synthetic construct
  source 1..20: mol_type = other RNA
tctcagagcgtttggaggca

SEQ ID NO: 3223 - RNA, 20 nt, synthetic construct
  source 1..20: mol_type = other RNA
gcgtttggaggcagggtctt

SEQ ID NO: 3224 - RNA, 20 nt, synthetic construct
  source 1..20: mol_type = other RNA
ggtctttggagatgactgag

SEQ ID NO: 3225 - RNA, 20 nt, synthetic construct
  source 1..20: mol_type = other RNA
gtctttggagatgactgagt

SEQ ID NO: 3226 - RNA, 20 nt, synthetic construct
  source 1..20: mol_type = other RNA
tctttggagatgactgagtg

SEQ ID NO: 3227 - RNA, 20 nt, synthetic construct
  source 1..20: mol_type = other RNA
atgactgagtggggaatccc

SEQ ID NO: 3228 - RNA, 20 nt, synthetic construct
  source 1..20: mol_type = other RNA
tgttcatgtgtggggagcct

SEQ ID NO: 3229 - RNA, 20 nt, synthetic construct
  source 1..20: mol_type = other RNA
atgttcatgtgtggggagcc

SEQ ID NO: 3230 - RNA, 20 nt, synthetic construct
  source 1..20: mol_type = other RNA
ccaggtgatgttcatgtgtg

SEQ ID NO: 3231 - RNA, 20 nt, synthetic construct
  source 1..20: mol_type = other RNA
cccaggtgatgttcatgtgt

SEQ ID NO: 3232 - RNA, 20 nt, synthetic construct
  source 1..20: mol_type = other RNA
tcccaggtgatgttcatgtg

SEQ ID NO: 3233 - RNA, 20 nt, synthetic construct
  source 1..20: mol_type = other RNA
ccccacacatgaacatcacc

SEQ ID NO: 3234 - RNA, 20 nt, synthetic construct
  source 1..20: mol_type = other RNA
cccacacatgaacatcacct

SEQ ID NO: 3235 - RNA, 20 nt, synthetic construct
  source 1..20: mol_type = other RNA
ctgaacaggttgatcatccc

SEQ ID NO: 3236 - RNA, 20 nt, synthetic construct
  source 1..20: mol_type = other RNA
ctgggatgatcaacctgttc

SEQ ID NO: 3237 - RNA, 20 nt, synthetic construct
  source 1..20: mol_type = other RNA
cgggaacctacatcctgaac

SEQ ID NO: 3238 - RNA, 20 nt, synthetic construct
  source 1..20: mol_type = other RNA
gatcaacctgttcaggatgt

SEQ ID NO: 3239 - RNA, 20 nt, synthetic construct
  source 1..20: mol_type = other RNA
ctgttcaggatgtaggttcc

SEQ ID NO: 3240 - RNA, 20 nt, synthetic construct
  source 1..20: mol_type = other RNA
tgttcaggatgtaggttccc

SEQ ID NO: 3241 - RNA, 20 nt, synthetic construct
  source 1..20: mol_type = other RNA
ccgggcctgggggtgagccc

SEQ ID NO: 3242 - RNA, 20 nt, synthetic construct
  source 1..20: mol_type = other RNA
accgggcctgggggtgagcc

SEQ ID NO: 3243 - RNA, 20 nt, synthetic construct
  source 1..20: mol_type = other RNA
aggttcccgggctcaccccc

SEQ ID NO: 3244 - RNA, 20 nt, synthetic construct
  source 1..20: mol_type = other RNA
gcctagccaaccgggcctgg

SEQ ID NO: 3245 - RNA, 20 nt, synthetic construct
  source 1..20: mol_type = other RNA
cccgggctcacccccaggcc

SEQ ID NO: 3246 - RNA, 20 nt, synthetic construct
  source 1..20: mol_type = other RNA
ggcctagccaaccgggcctg

SEQ ID NO: 3247 - RNA, 20 nt, synthetic construct
  source 1..20: mol_type = other RNA
aggcctagccaaccgggcct

SEQ ID NO: 3248 - RNA, 20 nt, synthetic construct
  source 1..20: mol_type = other RNA
caggcctagccaaccgggcc

SEQ ID NO: 3249 - RNA, 20 nt, synthetic construct
  source 1..20: mol_type = other RNA
ggctcacccccaggcccggt

SEQ ID NO: 3250 - RNA, 20 nt, synthetic construct
  source 1..20: mol_type = other RNA
caccccaggcctagccaacc

SEQ ID NO: 3251 - RNA, 20 nt, synthetic construct
  source 1..20: mol_type = other RNA
tcaccccaggcctagccaac

SEQ ID NO: 3252 - RNA, 20 nt, synthetic construct
  source 1..20: mol_type = other RNA
acccccaggcccggttggct

SEQ ID NO: 3253 - RNA, 20 nt, synthetic construct
  source 1..20: mol_type = other RNA
caggcccggttggctaggcc

SEQ ID NO: 3254 - RNA, 20 nt, synthetic construct
  source 1..20: mol_type = other RNA
aggcccggttggctaggcct

SEQ ID NO: 3255 - RNA, 20 nt, synthetic construct
  source 1..20: mol_type = other RNA
ggcccggttggctaggcctg

SEQ ID NO: 3256 - RNA, 20 nt, synthetic construct
  source 1..20: mol_type = other RNA
ggttggctaggcctggggtg

SEQ ID NO: 3257 - RNA, 20 nt, synthetic construct
  source 1..20: mol_type = other RNA
caggatctcagcctcacccc

SEQ ID NO: 3258 - RNA, 20 nt, synthetic construct
  source 1..20: mol_type = other RNA
gggtgaggctgagatcctgc

SEQ ID NO: 3259 - RNA, 20 nt, synthetic construct
  source 1..20: mol_type = other RNA
ggatagatggtttaacctgc

SEQ ID NO: 3260 - RNA, 20 nt, synthetic construct
  source 1..20: mol_type = other RNA
ttggagtcacctgggataga

SEQ ID NO: 3261 - RNA, 20 nt, synthetic construct
  source 1..20: mol_type = other RNA
caggttaaaccatctatccc

SEQ ID NO: 3262 - RNA, 20 nt, synthetic construct
  source 1..20: mol_type = other RNA
aacgaacattggagtcacct

SEQ ID NO: 3263 - RNA, 20 nt, synthetic construct
  source 1..20: mol_type = other RNA
aaacgaacattggagtcacc

SEQ ID NO: 3264 - RNA, 20 nt, synthetic construct
  source 1..20: mol_type = other RNA
tttgccccacaaacgaacat

SEQ ID NO: 3265 - RNA, 20 nt, synthetic construct
  source 1..20: mol_type = other RNA
gtgactccaatgttcgtttg

SEQ ID NO: 3266 - RNA, 20 nt, synthetic construct
  source 1..20: mol_type = other RNA
tgactccaatgttcgtttgt

SEQ ID NO: 3267 - RNA, 20 nt, synthetic construct
  source 1..20: mol_type = other RNA
gactccaatgttcgtttgtg

SEQ ID NO: 3268 - RNA, 20 nt, synthetic construct
  source 1..20: mol_type = other RNA
tcccagtgtctctgacttga

SEQ ID NO: 3269 - RNA, 20 nt, synthetic construct
  source 1..20: mol_type = other RNA
ctcccagtgtctctgacttg

SEQ ID NO: 3270 - RNA, 20 nt, synthetic construct
  source 1..20: mol_type = other RNA
gtccctcaagtcagagacac

SEQ ID NO: 3271 - RNA, 20 nt, synthetic construct
  source 1..20: mol_type = other RNA
tccctcaagtcagagacact

SEQ ID NO: 3272 - RNA, 20 nt, synthetic construct
  source 1..20: mol_type = other RNA
ctcaagtcagagacactggg

SEQ ID NO: 3273 - RNA, 20 nt, synthetic construct
  source 1..20: mol_type = other RNA
gacactgggaggcgctgatg

SEQ ID NO: 3274 - RNA, 20 nt, synthetic construct
  source 1..20: mol_type = other RNA
ctgatagaggttttgtaaca

SEQ ID NO: 3275 - RNA, 20 nt, synthetic construct
  source 1..20: mol_type = other RNA
tctgatagaggttttgtaac

SEQ ID NO: 3276 - RNA, 20 nt, synthetic construct
  source 1..20: mol_type = other RNA
tggtactccttttctgatag

SEQ ID NO: 3277 - RNA, 20 nt, synthetic construct
  source 1..20: mol_type = other RNA
tacaaaacctctatcagaaa

SEQ ID NO: 3278 - RNA, 20 nt, synthetic construct
  source 1..20: mol_type = other RNA
tctatcagaaaaggagtacc

SEQ ID NO: 3279 - RNA, 20 nt, synthetic construct
  source 1..20: mol_type = other RNA
atcagaaaaggagtaccagg

SEQ ID NO: 3280 - RNA, 20 nt, synthetic construct
  source 1..20: mol_type = other RNA
aaacaaaacaaaacacctcc

SEQ ID NO: 3281 - RNA, 20 nt, synthetic construct
  source 1..20: mol_type = other RNA
tctgcaaactgcttgctatg

SEQ ID NO: 3282 - RNA, 20 nt, synthetic construct
  source 1..20: mol_type = other RNA
agcaagcagtttgcagacgc

SEQ ID NO: 3283 - RNA, 20 nt, synthetic construct
  source 1..20: mol_type = other RNA
cagacgcaggatttgaaccc

SEQ ID NO: 3284 - RNA, 20 nt, synthetic construct
  source 1..20: mol_type = other RNA
gctgggctctcagtagacca

SEQ ID NO: 3285 - RNA, 20 nt, synthetic construct
  source 1..20: mol_type = other RNA
ggctgggctctcagtagacc

SEQ ID NO: 3286 - RNA, 20 nt, synthetic construct
  source 1..20: mol_type = other RNA
tctgcttgctgcactgggct

SEQ ID NO: 3287 - RNA, 20 nt, synthetic construct
  source 1..20: mol_type = other RNA
atctgcttgctgcactgggc

SEQ ID NO: 3288 - RNA, 20 nt, synthetic construct
  source 1..20: mol_type = other RNA
tcacatctgcttgctgcact

SEQ ID NO: 3289 - RNA, 20 nt, synthetic construct
  source 1..20: mol_type = other RNA
ttcacatctgcttgctgcac

SEQ ID NO: 3290 - RNA, 20 nt, synthetic construct
  source 1..20: mol_type = other RNA
gacctgccctgcatttgtgg

SEQ ID NO: 3291 - RNA, 20 nt, synthetic construct
  source 1..20: mol_type = other RNA
tgggacctgccctgcatttg

SEQ ID NO: 3292 - RNA, 20 nt, synthetic construct
  source 1..20: mol_type = other RNA
atgtgaacctccacaaatgc

SEQ ID NO: 3293 - RNA, 20 nt, synthetic construct
  source 1..20: mol_type = other RNA
tgtgaacctccacaaatgca

SEQ ID NO: 3294 - RNA, 20 nt, synthetic construct
  source 1..20: mol_type = other RNA
aacctccacaaatgcagggc

SEQ ID NO: 3295 - RNA, 20 nt, synthetic construct
  source 1..20: mol_type = other RNA
acaaatgcagggcaggtccc

SEQ ID NO: 3296 - RNA, 20 nt, synthetic construct
  source 1..20: mol_type = other RNA
aggtttctctctgactgcct

SEQ ID NO: 3297 - RNA, 20 nt, synthetic construct
  source 1..20: mol_type = other RNA
caggtttctctctgactgcc

SEQ ID NO: 3298 - RNA, 20 nt, synthetic construct
  source 1..20: mol_type = other RNA
cagacagactgggtatcaac

SEQ ID NO: 3299 - RNA, 20 nt, synthetic construct
  source 1..20: mol_type = other RNA
ccccagccatcagacagact

SEQ ID NO: 3300 - RNA, 20 nt, synthetic construct
  source 1..20: mol_type = other RNA
gccccagccatcagacagac

SEQ ID NO: 3301 - RNA, 20 nt, synthetic construct
  source 1..20: mol_type = other RNA
ttgatacccagtctgtctga

SEQ ID NO: 3302 - RNA, 20 nt, synthetic construct
  source 1..20: mol_type = other RNA
tacccagtctgtctgatggc

SEQ ID NO: 3303 - RNA, 20 nt, synthetic construct
  source 1..20: mol_type = other RNA
acccagtctgtctgatggct

SEQ ID NO: 3304 - RNA, 20 nt, synthetic construct
  source 1..20: mol_type = other RNA
cccagtctgtctgatggctg

SEQ ID NO: 3305 - RNA, 20 nt, synthetic construct
  source 1..20: mol_type = other RNA
tctgtctgatggctggggct

SEQ ID NO: 3306 - RNA, 20 nt, synthetic construct
  source 1..20: mol_type = other RNA
ggtatctgaggctgggtctt

SEQ ID NO: 3307 - RNA, 20 nt, synthetic construct
  source 1..20: mol_type = other RNA
ttctcaaggtatctgaggct

SEQ ID NO: 3308 - RNA, 20 nt, synthetic construct
  source 1..20: mol_type = other RNA
cttctcaaggtatctgaggc

SEQ ID NO: 3309 - RNA, 20 nt, synthetic construct
  source 1..20: mol_type = other RNA
tgctcttctcaaggtatctg

SEQ ID NO: 3310 - RNA, 20 nt, synthetic construct
  source 1..20: mol_type = other RNA
ttctgattctgctcttctca

SEQ ID NO: 3311 - RNA, 20 nt, synthetic construct
  source 1..20: mol_type = other RNA
cagaatcagaaattaaccca

SEQ ID NO: 3312 - RNA, 20 nt, synthetic construct
  source 1..20: mol_type = other RNA
aactaatccagagtttcctt

SEQ ID NO: 3313 - RNA, 20 nt, synthetic construct
  source 1..20: mol_type = other RNA
gaactaatccagagtttcct

SEQ ID NO: 3314 - RNA, 20 nt, synthetic construct
  source 1..20: mol_type = other RNA
aaattaacccaaggaaactc

SEQ ID NO: 3315 - RNA, 20 nt, synthetic construct
  source 1..20: mol_type = other RNA
ggaaactctggattagttcc

SEQ ID NO: 3316 - RNA, 20 nt, synthetic construct
  source 1..20: mol_type = other RNA
cagccacttccctgattgcc

SEQ ID NO: 3317 - RNA, 20 nt, synthetic construct
  source 1..20: mol_type = other RNA
tggattagttccaggcaatc

SEQ ID NO: 3318 - RNA, 20 nt, synthetic construct
  source 1..20: mol_type = other RNA
ggattagttccaggcaatca

SEQ ID NO: 3319 - RNA, 20 nt, synthetic construct
  source 1..20: mol_type = other RNA
gttccaggcaatcagggaag

SEQ ID NO: 3320 - RNA, 20 nt, synthetic construct
  source 1..20: mol_type = other RNA
caggcaatcagggaagtggc

SEQ ID NO: 3321 - RNA, 20 nt, synthetic construct
  source 1..20: mol_type = other RNA
gcaatcagggaagtggctgg

SEQ ID NO: 3322 - RNA, 20 nt, synthetic construct
  source 1..20: mol_type = other RNA
caatcagggaagtggctgga

SEQ ID NO: 3323 - RNA, 20 nt, synthetic construct
  source 1..20: mol_type = other RNA
tcagggaagtggctggaggg

SEQ ID NO: 3324 - RNA, 20 nt, synthetic construct
  source 1..20: mol_type = other RNA
ggaagtggctggagggaggt

SEQ ID NO: 3325 - RNA, 20 nt, synthetic construct
  source 1..20: mol_type = other RNA
ggagggaggtaggaaacttc

SEQ ID NO: 3326 - RNA, 20 nt, synthetic construct
  source 1..20: mol_type = other RNA
tgtgactcaaggcaaatctg

SEQ ID NO: 3327 - RNA, 20 nt, synthetic construct
  source 1..20: mol_type = other RNA
tcacttgtcagtgtgactca

SEQ ID NO: 3328 - RNA, 20 nt, synthetic construct
  source 1..20: mol_type = other RNA
tacagatgaacctcagagag

SEQ ID NO: 3329 - RNA, 20 nt, synthetic construct
  source 1..20: mol_type = other RNA
caagtgacttcccctctctg

SEQ ID NO: 3330 - RNA, 20 nt, synthetic construct
  source 1..20: mol_type = other RNA
ttacagatgaacctcagaga

SEQ ID NO: 3331 - RNA, 20 nt, synthetic construct
  source 1..20: mol_type = other RNA
tttacagatgaacctcagag

SEQ ID NO: 3332 - RNA, 20 nt, synthetic construct
  source 1..20: mol_type = other RNA
tctgaggttcatctgtaaaa

SEQ ID NO: 3333 - RNA, 20 nt, synthetic construct
  source 1..20: mol_type = other RNA
aatgcatgaatattctttgg

SEQ ID NO: 3334 - RNA, 20 nt, synthetic construct
  source 1..20: mol_type = other RNA
cccaatgcatgaatattctt

SEQ ID NO: 3335 - RNA, 20 nt, synthetic construct
  source 1..20: mol_type = other RNA
accaaagaatattcatgcat

SEQ ID NO: 3336 - RNA, 20 nt, synthetic construct
  source 1..20: mol_type = other RNA
ccaaagaatattcatgcatt

SEQ ID NO: 3337 - RNA, 20 nt, synthetic construct
  source 1..20: mol_type = other RNA
ataattattatagatcctaa

SEQ ID NO: 3338 - RNA, 20 nt, synthetic construct
  source 1..20: mol_type = other RNA
taattattatagatcctaaa

SEQ ID NO: 3339 - RNA, 20 nt, synthetic construct
  source 1..20: mol_type = other RNA
tctttctaaacaatcccttt

SEQ ID NO: 3340 - RNA, 20 nt, synthetic construct
  source 1..20: mol_type = other RNA
caggtgtgaaccactgctcc

SEQ ID NO: 3341 - RNA, 20 nt, synthetic construct
  source 1..20: mol_type = other RNA
tcccaaagtgctaggattac

SEQ ID NO: 3342 - RNA, 20 nt, synthetic construct
  source 1..20: mol_type = other RNA
cctcggcctcccaaagtgct

SEQ ID NO: 3343 - RNA, 20 nt, synthetic construct
  source 1..20: mol_type = other RNA
cacctgtaatcctagcactt

SEQ ID NO: 3344 - RNA, 20 nt, synthetic construct
  source 1..20: mol_type = other RNA
acctgtaatcctagcacttt

SEQ ID NO: 3345 - RNA, 20 nt, synthetic construct
  source 1..20: mol_type = other RNA
tgtaatcctagcactttggg

SEQ ID NO: 3346 - RNA, 20 nt, synthetic construct
  source 1..20: mol_type = other RNA
cctagcactttgggaggccg

SEQ ID NO: 3347 - RNA, 20 nt, synthetic construct
  source 1..20: mol_type = other RNA
agcactttgggaggccgagg

SEQ ID NO: 3348 - RNA, 20 nt, synthetic construct
  source 1..20: mol_type = other RNA
gcactttgggaggccgaggc

SEQ ID NO: 3349 - RNA, 20 nt, synthetic construct
  source 1..20: mol_type = other RNA
ctcaagcaatccacccgcct

SEQ ID NO: 3350 - RNA, 20 nt, synthetic construct
  source 1..20: mol_type = other RNA
ctttgggaggccgaggcggg

SEQ ID NO: 3351 - RNA, 20 nt, synthetic construct
  source 1..20: mol_type = other RNA
cgaggcgggtggattgcttg

SEQ ID NO: 3352 - RNA, 20 nt, synthetic construct
  source 1..20: mol_type = other RNA
cgggtggattgcttgaggcc

SEQ ID NO: 3353 - RNA, 20 nt, synthetic construct
  source 1..20: mol_type = other RNA
ccaggctggtcttgaactcc

SEQ ID NO: 3354 - RNA, 20 nt, synthetic construct
  source 1..20: mol_type = other RNA
ccaggagttcaagaccagcc

SEQ ID NO: 3355 - RNA, 20 nt, synthetic construct
  source 1..20: mol_type = other RNA
caggagttcaagaccagcct

SEQ ID NO: 3356 - RNA, 20 nt, synthetic construct
  source 1..20: mol_type = other RNA
tttctccaggttgcccaggc

SEQ ID NO: 3357 - RNA, 20 nt, synthetic construct
  source 1..20: mol_type = other RNA
ggggtttctccaggttgccc

SEQ ID NO: 3358 - RNA, 20 nt, synthetic construct
  source 1..20: mol_type = other RNA
caagaccagcctgggcaacc

SEQ ID NO: 3359 - RNA, 20 nt, synthetic construct
  source 1..20: mol_type = other RNA
agtagagttggggtttctcc

SEQ ID NO: 3360 - RNA, 20 nt, synthetic construct
  source 1..20: mol_type = other RNA
aaagtgttttagtagagttg

SEQ ID NO: 3361 - RNA, 20 nt, synthetic construct
  source 1..20: mol_type = other RNA
aaaagtgttttagtagagtt

SEQ ID NO: 3362 - RNA, 20 nt, synthetic construct
  source 1..20: mol_type = other RNA
aaaaagtgttttagtagagt

SEQ ID NO: 3363 - RNA, 20 nt, synthetic construct
  source 1..20: mol_type = other RNA
acacttttttgtgttttagc

SEQ ID NO: 3364 - RNA, 20 nt, synthetic construct
  source 1..20: mol_type = other RNA
cacttttttgtgttttagcc

SEQ ID NO: 3365 - RNA, 20 nt, synthetic construct
  source 1..20: mol_type = other RNA
ttttgtgttttagccgggca

SEQ ID NO: 3366 - RNA, 20 nt, synthetic construct
  source 1..20: mol_type = other RNA
caggtgtgcaccaccatgcc

SEQ ID NO: 3367 - RNA, 20 nt, synthetic construct
  source 1..20: mol_type = other RNA
tgtgttttagccgggcatgg

SEQ ID NO: 3368 - RNA, 20 nt, synthetic construct
  source 1..20: mol_type = other RNA
tcccaagtagttgagattac

SEQ ID NO: 3369 - RNA, 20 nt, synthetic construct
  source 1..20: mol_type = other RNA
cacctgtaatctcaactact

SEQ ID NO: 3370 - RNA, 20 nt, synthetic construct
  source 1..20: mol_type = other RNA
acctgtaatctcaactactt

SEQ ID NO: 3371 - RNA, 20 nt, synthetic construct
  source 1..20: mol_type = other RNA
tgtaatctcaactacttggg

SEQ ID NO: 3372 - RNA, 20 nt, synthetic construct
  source 1..20: mol_type = other RNA
ctcaactacttgggaggctg

SEQ ID NO: 3373 - RNA, 20 nt, synthetic construct
  source 1..20: mol_type = other RNA
gagaatcacttgaacccaag

SEQ ID NO: 3374 - RNA, 20 nt, synthetic construct
  source 1..20: mol_type = other RNA
aatcacttgaacccaagagg

SEQ ID NO: 3375 - RNA, 20 nt, synthetic construct
  source 1..20: mol_type = other RNA
tcgggtaaactccgcctctt

SEQ ID NO: 3376 - RNA, 20 nt, synthetic construct
  source 1..20: mol_type = other RNA
ctcgggtaaactccgcctct

SEQ ID NO: 3377 - RNA, 20 nt, synthetic construct
  source 1..20: mol_type = other RNA
agaggcggagtttacccgag

SEQ ID NO: 3378 - RNA, 20 nt, synthetic construct
  source 1..20: mol_type = other RNA
ggcggagtttacccgagagg

SEQ ID NO: 3379 - RNA, 20 nt, synthetic construct
  source 1..20: mol_type = other RNA
tcgggtaacctccacctctc

SEQ ID NO: 3380 - RNA, 20 nt, synthetic construct
  source 1..20: mol_type = other RNA
ctcgggtaacctccacctct

SEQ ID NO: 3381 - RNA, 20 nt, synthetic construct
  source 1..20: mol_type = other RNA
ggagtttacccgagaggtgg

SEQ ID NO: 3382 - RNA, 20 nt, synthetic construct
  source 1..20: mol_type = other RNA
gtggtgcaatctcagctctc

SEQ ID NO: 3383 - RNA, 20 nt, synthetic construct
  source 1..20: mol_type = other RNA
agtggtgcaatctcagctct

SEQ ID NO: 3384 - RNA, 20 nt, synthetic construct
  source 1..20: mol_type = other RNA
ttgcccaggctggcgtgcag

SEQ ID NO: 3385 - RNA, 20 nt, synthetic construct
  source 1..20: mol_type = other RNA
tgcaccactgcacgccagcc

SEQ ID NO: 3386 - RNA, 20 nt, synthetic construct
  source 1..20: mol_type = other RNA
gcaccactgcacgccagcct

SEQ ID NO: 3387 - RNA, 20 nt, synthetic construct
  source 1..20: mol_type = other RNA
tcttgctctgttgcccaggc

SEQ ID NO: 3388 - RNA, 20 nt, synthetic construct
  source 1..20: mol_type = other RNA
acagtcttgctctgttgccc

SEQ ID NO: 3389 - RNA, 20 nt, synthetic construct
  source 1..20: mol_type = other RNA
caacagagcaagactgtctc

SEQ ID NO: 3390 - RNA, 20 nt, synthetic construct
  source 1..20: mol_type = other RNA
gagagagaaaaaagtcagag

SEQ ID NO: 3391 - RNA, 20 nt, synthetic construct
  source 1..20: mol_type = other RNA
aaagtcagagaggaaagcat

SEQ ID NO: 3392 - RNA, 20 nt, synthetic construct
  source 1..20: mol_type = other RNA
gagaggaaagcataggcaga

SEQ ID NO: 3393 - RNA, 20 nt, synthetic construct
  source 1..20: mol_type = other RNA
agaggaaagcataggcagat

SEQ ID NO: 3394 - RNA, 20 nt, synthetic construct
  source 1..20: mol_type = other RNA
ggaaagcataggcagatggg

SEQ ID NO: 3395 - RNA, 20 nt, synthetic construct
  source 1..20: mol_type = other RNA
actgtgtgtgtcttggtctt

SEQ ID NO: 3396 - RNA, 20 nt, synthetic construct
  source 1..20: mol_type = other RNA
tcttttgactgtgtgtgtct

SEQ ID NO: 3397 - RNA, 20 nt, synthetic construct
  source 1..20: mol_type = other RNA
agtcaaaagacagttcagaa

SEQ ID NO: 3398 - RNA, 20 nt, synthetic construct
  source 1..20: mol_type = other RNA
gtcaaaagacagttcagaaa

SEQ ID NO: 3399 - RNA, 20 nt, synthetic construct
  source 1..20: mol_type = other RNA
tcaaaagacagttcagaaag

SEQ ID NO: 3400 - RNA, 20 nt, synthetic construct
  source 1..20: mol_type = other RNA
gtccttcctatgagaatcgg

SEQ ID NO: 3401 - RNA, 20 nt, synthetic construct
  source 1..20: mol_type = other RNA
tatgtccttcctatgagaat

SEQ ID NO: 3402 - RNA, 20 nt, synthetic construct
  source 1..20: mol_type = other RNA
tagttaccaccgattctcat

SEQ ID NO: 3403 - RNA, 20 nt, synthetic construct
  source 1..20: mol_type = other RNA
taccaccgattctcatagga

SEQ ID NO: 3404 - RNA, 20 nt, synthetic construct
  source 1..20: mol_type = other RNA
cttgatgtcagaaggattga

SEQ ID NO: 3405 - RNA, 20 nt, synthetic construct
  source 1..20: mol_type = other RNA
actttgtccttgatgtcaga

SEQ ID NO: 3406 - RNA, 20 nt, synthetic construct
  source 1..20: mol_type = other RNA
cttcaatccttctgacatca

SEQ ID NO: 3407 - RNA, 20 nt, synthetic construct
  source 1..20: mol_type = other RNA
tagggcactgtcaaacatca

SEQ ID NO: 3408 - RNA, 20 nt, synthetic construct
  source 1..20: mol_type = other RNA
ttagggcactgtcaaacatc

SEQ ID NO: 3409 - RNA, 20 nt, synthetic construct
  source 1..20: mol_type = other RNA
agaaatcttagcaagcatta

SEQ ID NO: 3410 - RNA, 20 nt, synthetic construct
  source 1..20: mol_type = other RNA
aagaaatcttagcaagcatt

SEQ ID NO: 3411 - RNA, 20 nt, synthetic construct
  source 1..20: mol_type = other RNA
aagatttctttttaacaaag

SEQ ID NO: 3412 - RNA, 20 nt, synthetic construct
  source 1..20: mol_type = other RNA
caaaccaacagtatcacttg

SEQ ID NO: 3413 - RNA, 20 nt, synthetic construct
  source 1..20: mol_type = other RNA
tcaaccacaagtgatactgt

SEQ ID NO: 3414 - RNA, 20 nt, synthetic construct
  source 1..20: mol_type = other RNA
cacaagtgatactgttggtt

SEQ ID NO: 3415 - RNA, 20 nt, synthetic construct
  source 1..20: mol_type = other RNA
cttttttttccatgtataaa

SEQ ID NO: 3416 - RNA, 20 nt, synthetic construct
  source 1..20: mol_type = other RNA
tttgcttttccgtttataca

SEQ ID NO: 3417 - RNA, 20 nt, synthetic construct
  source 1..20: mol_type = other RNA
gttttctttttgtaaaatca

SEQ ID NO: 3418 - RNA, 20 nt, synthetic construct
  source 1..20: mol_type = other RNA
acatttgaaagtggttaaaa

SEQ ID NO: 3419 - RNA, 20 nt, synthetic construct
  source 1..20: mol_type = other RNA
ctgaaatgtacatttgaaag

SEQ ID NO: 3420 - RNA, 20 nt, synthetic construct
  source 1..20: mol_type = other RNA
ctttcaaatgtacatttcag

SEQ ID NO: 3421 - RNA, 20 nt, synthetic construct
  source 1..20: mol_type = other RNA
ctggagatggatggtagcgg

SEQ ID NO: 3422 - RNA, 20 nt, synthetic construct
  source 1..20: mol_type = other RNA
gttctggagatggatggtag

SEQ ID NO: 3423 - RNA, 20 nt, synthetic construct
  source 1..20: mol_type = other RNA
gaaaaagttctggagatgga

SEQ ID NO: 3424 - RNA, 20 nt, synthetic construct
  source 1..20: mol_type = other RNA
ggatgaaaaagttctggaga

SEQ ID NO: 3425 - RNA, 20 nt, synthetic construct
  source 1..20: mol_type = other RNA
ttgggaggatgaaaaagttc

SEQ ID NO: 3426 - RNA, 20 nt, synthetic construct
  source 1..20: mol_type = other RNA
gggtagagtttcagtttggg

SEQ ID NO: 3427 - RNA, 20 nt, synthetic construct
  source 1..20: mol_type = other RNA
attgggtagagtttcagttt

SEQ ID NO: 3428 - RNA, 20 nt, synthetic construct
  source 1..20: mol_type = other RNA
tattgggtagagtttcagtt

SEQ ID NO: 3429 - RNA, 20 nt, synthetic construct
  source 1..20: mol_type = other RNA
gtggggagttattgcttatt

SEQ ID NO: 3430 - RNA, 20 nt, synthetic construct
  source 1..20: mol_type = other RNA
agtggggagttattgcttat

SEQ ID NO: 3431 - RNA, 20 nt, synthetic construct
  source 1..20: mol_type = other RNA
gctgggtggaaggggcagtg

SEQ ID NO: 3432 - RNA, 20 nt, synthetic construct
  source 1..20: mol_type = other RNA
agctgggtggaaggggcagt

SEQ ID NO: 3433 - RNA, 20 nt, synthetic construct
  source 1..20: mol_type = other RNA
gagctgggtggaaggggcag

SEQ ID NO: 3434 - RNA, 20 nt, synthetic construct
  source 1..20: mol_type = other RNA
taccacgagctgggtggaag

SEQ ID NO: 3435 - RNA, 20 nt, synthetic construct
  source 1..20: mol_type = other RNA
ttaccacgagctgggtggaa

SEQ ID NO: 3436 - RNA, 20 nt, synthetic construct
  source 1..20: mol_type = other RNA
gttaccacgagctgggtgga

SEQ ID NO: 3437 - RNA, 20 nt, synthetic construct
  source 1..20: mol_type = other RNA
tggagttaccacgagctggg

SEQ ID NO: 3438 - RNA, 20 nt, synthetic construct
  source 1..20: mol_type = other RNA
tgccccttccacccagctcg

SEQ ID NO: 3439 - RNA, 20 nt, synthetic construct
  source 1..20: mol_type = other RNA
agttggagttaccacgagct

SEQ ID NO: 3440 - RNA, 20 nt, synthetic construct
  source 1..20: mol_type = other RNA
aagttggagttaccacgagc

SEQ ID NO: 3441 - RNA, 20 nt, synthetic construct
  source 1..20: mol_type = other RNA
aaaacatagagacaggaagt

SEQ ID NO: 3442 - RNA, 20 nt, synthetic construct
  source 1..20: mol_type = other RNA
gtagcccaaaacatagagac

SEQ ID NO: 3443 - RNA, 20 nt, synthetic construct
  source 1..20: mol_type = other RNA
aacttcctgtctctatgttt

SEQ ID NO: 3444 - RNA, 20 nt, synthetic construct
  source 1..20: mol_type = other RNA
acttcctgtctctatgtttt

SEQ ID NO: 3445 - RNA, 20 nt, synthetic construct
  source 1..20: mol_type = other RNA
cacgtaattctatttatagg

SEQ ID NO: 3446 - RNA, 20 nt, synthetic construct
  source 1..20: mol_type = other RNA
tatcacgtaattctatttat

SEQ ID NO: 3447 - RNA, 20 nt, synthetic construct
  source 1..20: mol_type = other RNA
gatatttgtctttttgtgcc

SEQ ID NO: 3448 - RNA, 20 nt, synthetic construct
  source 1..20: mol_type = other RNA
tatgctaagtgaaagaagcc

SEQ ID NO: 3449 - RNA, 20 nt, synthetic construct
  source 1..20: mol_type = other RNA
cacttagcataatgtcttcc

SEQ ID NO: 3450 - RNA, 20 nt, synthetic construct
  source 1..20: mol_type = other RNA
tggcacgacatggatgaacc

SEQ ID NO: 3451 - RNA, 20 nt, synthetic construct
  source 1..20: mol_type = other RNA
gaattacacatggcacgaca

SEQ ID NO: 3452 - RNA, 20 nt, synthetic construct
  source 1..20: mol_type = other RNA
ccatagaaaggaattacaca

SEQ ID NO: 3453 - RNA, 20 nt, synthetic construct
  source 1..20: mol_type = other RNA
ccatgtgtaattcctttcta

SEQ ID NO: 3454 - RNA, 20 nt, synthetic construct
  source 1..20: mol_type = other RNA
aatactattccgccatagaa

SEQ ID NO: 3455 - RNA, 20 nt, synthetic construct
  source 1..20: mol_type = other RNA
tgtgtaattcctttctatgg

SEQ ID NO: 3456 - RNA, 20 nt, synthetic construct
  source 1..20: mol_type = other RNA
cggaatagtattctaatatg

SEQ ID NO: 3457 - RNA, 20 nt, synthetic construct
  source 1..20: mol_type = other RNA
tgaatggatgaacaaaatat

SEQ ID NO: 3458 - RNA, 20 nt, synthetic construct
  source 1..20: mol_type = other RNA
atgaatggatgaacaaaata

SEQ ID NO: 3459 - RNA, 20 nt, synthetic construct
  source 1..20: mol_type = other RNA
agtgtctatcaacaaatgaa

SEQ ID NO: 3460 - RNA, 20 nt, synthetic construct
  source 1..20: mol_type = other RNA
ttcatttgttgatagacact

SEQ ID NO: 3461 - RNA, 20 nt, synthetic construct
  source 1..20: mol_type = other RNA
tcatttgttgatagacactt

SEQ ID NO: 3462 - RNA, 20 nt, synthetic construct
  source 1..20: mol_type = other RNA
attcacaatagtcaagaggt

SEQ ID NO: 3463 - RNA, 20 nt, synthetic construct
  source 1..20: mol_type = other RNA
gattattcacaatagtcaag

SEQ ID NO: 3464 - RNA, 20 nt, synthetic construct
  source 1..20: mol_type = other RNA
ctattgtgaataatcttgct

SEQ ID NO: 3465 - RNA, 20 nt, synthetic construct
  source 1..20: mol_type = other RNA
gaataatcttgctaggtaca

SEQ ID NO: 3466 - RNA, 20 nt, synthetic construct
  source 1..20: mol_type = other RNA
aataatcttgctaggtacat

SEQ ID NO: 3467 - RNA, 20 nt, synthetic construct
  source 1..20: mol_type = other RNA
aatcttgctaggtacatggg

SEQ ID NO: 3468 - RNA, 20 nt, synthetic construct
  source 1..20: mol_type = other RNA
gctttctagagttgaaagcg

SEQ ID NO: 3469 - RNA, 20 nt, synthetic construct
  source 1..20: mol_type = other RNA
agctttctagagttgaaagc

SEQ ID NO: 3470 - RNA, 20 nt, synthetic construct
  source 1..20: mol_type = other RNA
aagctttctagagttgaaag

SEQ ID NO: 3471 - RNA, 20 nt, synthetic construct
  source 1..20: mol_type = other RNA
agaaagctttcttttaaaat

SEQ ID NO: 3472 - RNA, 20 nt, synthetic construct
  source 1..20: mol_type = other RNA
ttaatttaagaaaaatacta

SEQ ID NO: 3473 - RNA, 20 nt, synthetic construct
  source 1..20: mol_type = other RNA
actaaggtaaattgtagaac

SEQ ID NO: 3474 - RNA, 20 nt, synthetic construct
  source 1..20: mol_type = other RNA
ttccatctttacaatttttg

SEQ ID NO: 3475 - RNA, 20 nt, synthetic construct
  source 1..20: mol_type = other RNA
cttccatctttacaattttt

SEQ ID NO: 3476 - RNA, 20 nt, synthetic construct
  source 1..20: mol_type = other RNA
tcttccatctttacaatttt

SEQ ID NO: 3477 - RNA, 20 nt, synthetic construct
  source 1..20: mol_type = other RNA
gaccccaaaaattgtaaaga

SEQ ID NO: 3478 - RNA, 20 nt, synthetic construct
  source 1..20: mol_type = other RNA
gaagacgaatgcctgcagtt

SEQ ID NO: 3479 - RNA, 20 nt, synthetic construct
  source 1..20: mol_type = other RNA
catccggtttcccaaactgc

SEQ ID NO: 3480 - RNA, 20 nt, synthetic construct
  source 1..20: mol_type = other RNA
aagacgaatgcctgcagttt

SEQ ID NO: 3481 - RNA, 20 nt, synthetic construct
  source 1..20: mol_type = other RNA
atgcctgcagtttgggaaac

SEQ ID NO: 3482 - RNA, 20 nt, synthetic construct
  source 1..20: mol_type = other RNA
agtttgggaaaccggatgag

SEQ ID NO: 3483 - RNA, 20 nt, synthetic construct
  source 1..20: mol_type = other RNA
tccaggtctttcctctcatc

SEQ ID NO: 3484 - RNA, 20 nt, synthetic construct
  source 1..20: mol_type = other RNA
accggatgagaggaaagacc

SEQ ID NO: 3485 - RNA, 20 nt, synthetic construct
  source 1..20: mol_type = other RNA
tagattttacaatagcttcc

SEQ ID NO: 3486 - RNA, 20 nt, synthetic construct
  source 1..20: mol_type = other RNA
ctattgtaaaatctatgctg

SEQ ID NO: 3487 - RNA, 20 nt, synthetic construct
  source 1..20: mol_type = other RNA
tattgtaaaatctatgctga

SEQ ID NO: 3488 - RNA, 20 nt, synthetic construct
  source 1..20: mol_type = other RNA
taaaatctatgctgagggtc

SEQ ID NO: 3489 - RNA, 20 nt, synthetic construct
  source 1..20: mol_type = other RNA
gtctggtgactactagacca

SEQ ID NO: 3490 - RNA, 20 nt, synthetic construct
  source 1..20: mol_type = other RNA
tctggtgactactagaccaa

SEQ ID NO: 3491 - RNA, 20 nt, synthetic construct
  source 1..20: mol_type = other RNA
tgactactagaccaagggca

SEQ ID NO: 3492 - RNA, 20 nt, synthetic construct
  source 1..20: mol_type = other RNA
gccctctgctgccatgccct

SEQ ID NO: 3493 - RNA, 20 nt, synthetic construct
  source 1..20: mol_type = other RNA
gaccaagggcatggcagcag

SEQ ID NO: 3494 - RNA, 20 nt, synthetic construct
  source 1..20: mol_type = other RNA
accaagggcatggcagcaga

SEQ ID NO: 3495 - RNA, 20 nt, synthetic construct
  source 1..20: mol_type = other RNA
gagggcagctgaaagacttc

SEQ ID NO: 3496 - RNA, 20 nt, synthetic construct
  source 1..20: mol_type = other RNA
gcagctgaaagacttcagga

SEQ ID NO: 3497 - RNA, 20 nt, synthetic construct
  source 1..20: mol_type = other RNA
aaagatataagaattaagaa

SEQ ID NO: 3498 - RNA, 20 nt, synthetic construct
  source 1..20: mol_type = other RNA
aagatataagaattaagaaa

SEQ ID NO: 3499 - RNA, 20 nt, synthetic construct
  source 1..20: mol_type = other RNA
agatataagaattaagaaag

SEQ ID NO: 3500 - RNA, 20 nt, synthetic construct
  source 1..20: mol_type = other RNA
taagaattaagaaaggggcc

SEQ ID NO: 3501 - RNA, 20 nt, synthetic construct
  source 1..20: mol_type = other RNA
caggcatgagccactgcacc

SEQ ID NO: 3502 - RNA, 20 nt, synthetic construct
  source 1..20: mol_type = other RNA
aagaaaggggcctggtgcag

SEQ ID NO: 3503 - RNA, 20 nt, synthetic construct
  source 1..20: mol_type = other RNA
tcccaaggtgatggaattac

SEQ ID NO: 3504 - RNA, 20 nt, synthetic construct
  source 1..20: mol_type = other RNA
tgcctgtaattccatcacct

SEQ ID NO: 3505 - RNA, 20 nt, synthetic construct
  source 1..20: mol_type = other RNA
gccttgacctcccaaggtga

SEQ ID NO: 3506 - RNA, 20 nt, synthetic construct
  source 1..20: mol_type = other RNA
gcctgtaattccatcacctt

SEQ ID NO: 3507 - RNA, 20 nt, synthetic construct
  source 1..20: mol_type = other RNA
tgtaattccatcaccttggg

SEQ ID NO: 3508 - RNA, 20 nt, synthetic construct
  source 1..20: mol_type = other RNA
catcctgccttgacctccca

SEQ ID NO: 3509 - RNA, 20 nt, synthetic construct
  source 1..20: mol_type = other RNA
tccatcaccttgggaggtca

SEQ ID NO: 3510 - RNA, 20 nt, synthetic construct
  source 1..20: mol_type = other RNA
tcaccttgggaggtcaaggc

SEQ ID NO: 3511 - RNA, 20 nt, synthetic construct
  source 1..20: mol_type = other RNA
gggaggtcaaggcaggatga

SEQ ID NO: 3512 - RNA, 20 nt, synthetic construct
  source 1..20: mol_type = other RNA
caggatgatggcttgagacc

SEQ ID NO: 3513 - RNA, 20 nt, synthetic construct
  source 1..20: mol_type = other RNA
ccaggctggtcttgaactcc

SEQ ID NO: 3514 - RNA, 20 nt, synthetic construct
  source 1..20: mol_type = other RNA
ccaggagttcaagaccagcc

SEQ ID NO: 3515 - RNA, 20 nt, synthetic construct
  source 1..20: mol_type = other RNA
caggagttcaagaccagcct

SEQ ID NO: 3516 - RNA, 20 nt, synthetic construct
  source 1..20: mol_type = other RNA
tcttgctctgttgcccaggc

SEQ ID NO: 3517 - RNA, 20 nt, synthetic construct
  source 1..20: mol_type = other RNA
aaggtcttgctctgttgccc

SEQ ID NO: 3518 - RNA, 20 nt, synthetic construct
  source 1..20: mol_type = other RNA
acagagcaagaccttttttt

SEQ ID NO: 3519 - RNA, 20 nt, synthetic construct
  source 1..20: mol_type = other RNA
tatatttttttcctaaaaaa

SEQ ID NO: 3520 - RNA, 20 nt, synthetic construct
  source 1..20: mol_type = other RNA
tttttgaaaatacagattcc

SEQ ID NO: 3521 - RNA, 20 nt, synthetic construct
  source 1..20: mol_type = other RNA
tgaaaatacagattccaggc

SEQ ID NO: 3522 - RNA, 20 nt, synthetic construct
  source 1..20: mol_type = other RNA
gaaaatacagattccaggcc

SEQ ID NO: 3523 - RNA, 20 nt, synthetic construct
  source 1..20: mol_type = other RNA
gtgagccaccatgcccggcc

SEQ ID NO: 3524 - RNA, 20 nt, synthetic construct
  source 1..20: mol_type = other RNA
tacagattccaggccgggca

SEQ ID NO: 3525 - RNA, 20 nt, synthetic construct
  source 1..20: mol_type = other RNA
caggtgtgagccaccatgcc

SEQ ID NO: 3526 - RNA, 20 nt, synthetic construct
  source 1..20: mol_type = other RNA
agattccaggccgggcatgg

SEQ ID NO: 3527 - RNA, 20 nt, synthetic construct
  source 1..20: mol_type = other RNA
tcccaaagtgctggggttac

SEQ ID NO: 3528 - RNA, 20 nt, synthetic construct
  source 1..20: mol_type = other RNA
ctcagcctcccaaagtgctg

SEQ ID NO: 3529 - RNA, 20 nt, synthetic construct
  source 1..20: mol_type = other RNA
cctcagcctcccaaagtgct

SEQ ID NO: 3530 - RNA, 20 nt, synthetic construct
  source 1..20: mol_type = other RNA
cacctgtaaccccagcactt

SEQ ID NO: 3531 - RNA, 20 nt, synthetic construct
  source 1..20: mol_type = other RNA
gcctcagcctcccaaagtgc

SEQ ID NO: 3532 - RNA, 20 nt, synthetic construct
  source 1..20: mol_type = other RNA
acctgtaaccccagcacttt

SEQ ID NO: 3533 - RNA, 20 nt, synthetic construct
  source 1..20: mol_type = other RNA
tgtaaccccagcactttggg

SEQ ID NO: 3534 - RNA, 20 nt, synthetic construct
  source 1..20: mol_type = other RNA
cccagcactttgggaggctg

SEQ ID NO: 3535 - RNA, 20 nt, synthetic construct
  source 1..20: mol_type = other RNA
gcactttgggaggctgaggc

SEQ ID NO: 3536 - RNA, 20 nt, synthetic construct
  source 1..20: mol_type = other RNA
ctttgggaggctgaggccgg

SEQ ID NO: 3537 - RNA, 20 nt, synthetic construct
  source 1..20: mol_type = other RNA
cctgatcccaggtgatccac

SEQ ID NO: 3538 - RNA, 20 nt, synthetic construct
  source 1..20: mol_type = other RNA
gctgaggccggtggatcacc

SEQ ID NO: 3539 - RNA, 20 nt, synthetic construct
  source 1..20: mol_type = other RNA
ctgaggccggtggatcacct

SEQ ID NO: 3540 - RNA, 20 nt, synthetic construct
  source 1..20: mol_type = other RNA
ccggtggatcacctgggatc

SEQ ID NO: 3541 - RNA, 20 nt, synthetic construct
  source 1..20: mol_type = other RNA
ggtctcgaactcctgatccc

SEQ ID NO: 3542 - RNA, 20 nt, synthetic construct
  source 1..20: mol_type = other RNA
tcaggagttcgagaccagcc

SEQ ID NO: 3543 - RNA, 20 nt, synthetic construct
  source 1..20: mol_type = other RNA
caggagttcgagaccagcct

SEQ ID NO: 3544 - RNA, 20 nt, synthetic construct
  source 1..20: mol_type = other RNA
tttcaccatgttgcccaggc

SEQ ID NO: 3545 - RNA, 20 nt, synthetic construct
  source 1..20: mol_type = other RNA
ggtgtttcaccatgttgccc

SEQ ID NO: 3546 - RNA, 20 nt, synthetic construct
  source 1..20: mol_type = other RNA
cgagaccagcctgggcaaca

SEQ ID NO: 3547 - RNA, 20 nt, synthetic construct
  source 1..20: mol_type = other RNA
ttttgtatttttaggagaga

SEQ ID NO: 3548 - RNA, 20 nt, synthetic construct
  source 1..20: mol_type = other RNA
ccggctaattttgtattttt

SEQ ID NO: 3549 - RNA, 20 nt, synthetic construct
  source 1..20: mol_type = other RNA
cctaaaaatacaaaattagc

SEQ ID NO: 3550 - RNA, 20 nt, synthetic construct
  source 1..20: mol_type = other RNA
ctaaaaatacaaaattagcc

SEQ ID NO: 3551 - RNA, 20 nt, synthetic construct
  source 1..20: mol_type = other RNA
caggcatgcaccactacacc

SEQ ID NO: 3552 - RNA, 20 nt, synthetic construct
  source 1..20: mol_type = other RNA
acaaaattagccgggtgtag

SEQ ID NO: 3553 - RNA, 20 nt, synthetic construct
  source 1..20: mol_type = other RNA
taccgagtagctgggattac

SEQ ID NO: 3554 - RNA, 20 nt, synthetic construct
  source 1..20: mol_type = other RNA
caccagcctaccgagtagct

SEQ ID NO: 3555 - RNA, 20 nt, synthetic construct
  source 1..20: mol_type = other RNA
tgcctgtaatcccagctact

SEQ ID NO: 3556 - RNA, 20 nt, synthetic construct
  source 1..20: mol_type = other RNA
ccaccagcctaccgagtagc

SEQ ID NO: 3557 - RNA, 20 nt, synthetic construct
  source 1..20: mol_type = other RNA
tgtaatcccagctactcggt

SEQ ID NO: 3558 - RNA, 20 nt, synthetic construct
  source 1..20: mol_type = other RNA
atcccagctactcggtaggc

SEQ ID NO: 3559 - RNA, 20 nt, synthetic construct
  source 1..20: mol_type = other RNA
ccagctactcggtaggctgg

SEQ ID NO: 3560 - RNA, 20 nt, synthetic construct
  source 1..20: mol_type = other RNA
gctactcggtaggctggtgg

SEQ ID NO: 3561 - RNA, 20 nt, synthetic construct
  source 1..20: mol_type = other RNA
gaggagaatcgcctgaaccc

SEQ ID NO: 3562 - RNA, 20 nt, synthetic construct
  source 1..20: mol_type = other RNA
aatctccgcctcctgggttc

SEQ ID NO: 3563 - RNA, 20 nt, synthetic construct
  source 1..20: mol_type = other RNA
gagaatcgcctgaacccagg

SEQ ID NO: 3564 - RNA, 20 nt, synthetic construct
  source 1..20: mol_type = other RNA
aatcgcctgaacccaggagg

SEQ ID NO: 3565 - RNA, 20 nt, synthetic construct
  source 1..20: mol_type = other RNA
caccgcaatctccgcctcct

SEQ ID NO: 3566 - RNA, 20 nt, synthetic construct
  source 1..20: mol_type = other RNA
tcaccgcaatctccgcctcc

SEQ ID NO: 3567 - RNA, 20 nt, synthetic construct
  source 1..20: mol_type = other RNA
aacccaggaggcggagattg

SEQ ID NO: 3568 - RNA, 20 nt, synthetic construct
  source 1..20: mol_type = other RNA
ggagtgcaatggtgtgatct

SEQ ID NO: 3569 - RNA, 20 nt, synthetic construct
  source 1..20: mol_type = other RNA
ttgcccaggctggagtgcaa

SEQ ID NO: 3570 - RNA, 20 nt, synthetic construct
  source 1..20: mol_type = other RNA
cacaccattgcactccagcc

SEQ ID NO: 3571 - RNA, 20 nt, synthetic construct
  source 1..20: mol_type = other RNA
acaccattgcactccagcct

SEQ ID NO: 3572 - RNA, 20 nt, synthetic construct
  source 1..20: mol_type = other RNA
ttcactcttgttgcccaggc

SEQ ID NO: 3573 - RNA, 20 nt, synthetic construct
  source 1..20: mol_type = other RNA
gagtttcactcttgttgccc

SEQ ID NO: 3574 - RNA, 20 nt, synthetic construct
  source 1..20: mol_type = other RNA
ttctttcattttttttgaga

SEQ ID NO: 3575 - RNA, 20 nt, synthetic construct
  source 1..20: mol_type = other RNA
tgaaagaaaatacagattcc

SEQ ID NO: 3576 - RNA, 20 nt, synthetic construct
  source 1..20: mol_type = other RNA
gaaagaaaatacagattcct

SEQ ID NO: 3577 - RNA, 20 nt, synthetic construct
  source 1..20: mol_type = other RNA
aaaatacagattcctgggcc

SEQ ID NO: 3578 - RNA, 20 nt, synthetic construct
  source 1..20: mol_type = other RNA
gggagtctgcagccgggccc

SEQ ID NO: 3579 - RNA, 20 nt, synthetic construct
  source 1..20: mol_type = other RNA
tattcagggagtctgcagcc

SEQ ID NO: 3580 - RNA, 20 nt, synthetic construct
  source 1..20: mol_type = other RNA
ctattcagggagtctgcagc

SEQ ID NO: 3581 - RNA, 20 nt, synthetic construct
  source 1..20: mol_type = other RNA
acccccagtgattctattca

SEQ ID NO: 3582 - RNA, 20 nt, synthetic construct
  source 1..20: mol_type = other RNA
cacccccagtgattctattc

SEQ ID NO: 3583 - RNA, 20 nt, synthetic construct
  source 1..20: mol_type = other RNA
gactccctgaatagaatcac

SEQ ID NO: 3584 - RNA, 20 nt, synthetic construct
  source 1..20: mol_type = other RNA
actccctgaatagaatcact

SEQ ID NO: 3585 - RNA, 20 nt, synthetic construct
  source 1..20: mol_type = other RNA
ctccctgaatagaatcactg

SEQ ID NO: 3586 - RNA, 20 nt, synthetic construct
  source 1..20: mol_type = other RNA
tccctgaatagaatcactgg

SEQ ID NO: 3587 - RNA, 20 nt, synthetic construct
  source 1..20: mol_type = other RNA
gaatagaatcactgggggtg

SEQ ID NO: 3588 - RNA, 20 nt, synthetic construct
  source 1..20: mol_type = other RNA
aatcactgggggtgaggccc

SEQ ID NO: 3589 - RNA, 20 nt, synthetic construct
  source 1..20: mol_type = other RNA
tgttaaaaacacagcgtcct

SEQ ID NO: 3590 - RNA, 20 nt, synthetic construct
  source 1..20: mol_type = other RNA
gtgttaaaaacacagcgtcc

SEQ ID NO: 3591 - RNA, 20 nt, synthetic construct
  source 1..20: mol_type = other RNA
gtgtttttaacacccttccc

SEQ ID NO: 3592 - RNA, 20 nt, synthetic construct
  source 1..20: mol_type = other RNA
gagtgagaattacctgggaa

SEQ ID NO: 3593 - RNA, 20 nt, synthetic construct
  source 1..20: mol_type = other RNA
tgagtgagaattacctggga

SEQ ID NO: 3594 - RNA, 20 nt, synthetic construct
  source 1..20: mol_type = other RNA
gctgtgagtgagaattacct

SEQ ID NO: 3595 - RNA, 20 nt, synthetic construct
  source 1..20: mol_type = other RNA
ggctgtgagtgagaattacc

SEQ ID NO: 3596 - RNA, 20 nt, synthetic construct
  source 1..20: mol_type = other RNA
agtccagccatcggcaggct

SEQ ID NO: 3597 - RNA, 20 nt, synthetic construct
  source 1..20: mol_type = other RNA
ctcacagccaagcctgccga

SEQ ID NO: 3598 - RNA, 20 nt, synthetic construct
  source 1..20: mol_type = other RNA
tacggagtccagccatcggc

SEQ ID NO: 3599 - RNA, 20 nt, synthetic construct
  source 1..20: mol_type = other RNA
cagccaagcctgccgatggc

SEQ ID NO: 3600 - RNA, 20 nt, synthetic construct
  source 1..20: mol_type = other RNA
tgactacggagtccagccat

SEQ ID NO: 3601 - RNA, 20 nt, synthetic construct
  source 1..20: mol_type = other RNA
tgcttgctgagatctgacta

SEQ ID NO: 3602 - RNA, 20 nt, synthetic construct
  source 1..20: mol_type = other RNA
gtagtcagatctcagcaagc

SEQ ID NO: 3603 - RNA, 20 nt, synthetic construct
  source 1..20: mol_type = other RNA
cagatctcagcaagcaggac

SEQ ID NO: 3604 - RNA, 20 nt, synthetic construct
  source 1..20: mol_type = other RNA
cagcaagcaggactggctcg

SEQ ID NO: 3605 - RNA, 20 nt, synthetic construct
  source 1..20: mol_type = other RNA
gactggctcgtggttcatct

SEQ ID NO: 3606 - RNA, 20 nt, synthetic construct
  source 1..20: mol_type = other RNA
actggctcgtggttcatctt

SEQ ID NO: 3607 - RNA, 20 nt, synthetic construct
  source 1..20: mol_type = other RNA
ctggctcgtggttcatcttg

SEQ ID NO: 3608 - RNA, 20 nt, synthetic construct
  source 1..20: mol_type = other RNA
gccagcactctgctgggtgc

SEQ ID NO: 3609 - RNA, 20 nt, synthetic construct
  source 1..20: mol_type = other RNA
ccccccgccagcactctgct

SEQ ID NO: 3610 - RNA, 20 nt, synthetic construct
  source 1..20: mol_type = other RNA
tccccccgccagcactctgc

SEQ ID NO: 3611 - RNA, 20 nt, synthetic construct
  source 1..20: mol_type = other RNA
tccagcacccagcagagtgc

SEQ ID NO: 3612 - RNA, 20 nt, synthetic construct
  source 1..20: mol_type = other RNA
agcacccagcagagtgctgg

SEQ ID NO: 3613 - RNA, 20 nt, synthetic construct
  source 1..20: mol_type = other RNA
gcacccagcagagtgctggc

SEQ ID NO: 3614 - RNA, 20 nt, synthetic construct
  source 1..20: mol_type = other RNA
cacccagcagagtgctggcg

SEQ ID NO: 3615 - RNA, 20 nt, synthetic construct
  source 1..20: mol_type = other RNA
acccagcagagtgctggcgg

SEQ ID NO: 3616 - RNA, 20 nt, synthetic construct
  source 1..20: mol_type = other RNA
cccagcagagtgctggcggg

SEQ ID NO: 3617 - RNA, 20 nt, synthetic construct
  source 1..20: mol_type = other RNA
gggactgtgttaagtagagc

SEQ ID NO: 3618 - RNA, 20 nt, synthetic construct
  source 1..20: mol_type = other RNA
ctgtgttaagtagagccgga

SEQ ID NO: 3619 - RNA, 20 nt, synthetic construct
  source 1..20: mol_type = other RNA
tgtgttaagtagagccggat

SEQ ID NO: 3620 - RNA, 20 nt, synthetic construct
  source 1..20: mol_type = other RNA
cactccagtcctgacccatc

SEQ ID NO: 3621 - RNA, 20 nt, synthetic construct
  source 1..20: mol_type = other RNA
taagtagagccggatgggtc

SEQ ID NO: 3622 - RNA, 20 nt, synthetic construct
  source 1..20: mol_type = other RNA
agagccggatgggtcaggac

SEQ ID NO: 3623 - RNA, 20 nt, synthetic construct
  source 1..20: mol_type = other RNA
gatgggtcaggactggagtg

SEQ ID NO: 3624 - RNA, 20 nt, synthetic construct
  source 1..20: mol_type = other RNA
atgggtcaggactggagtgt

SEQ ID NO: 3625 - RNA, 20 nt, synthetic construct
  source 1..20: mol_type = other RNA
tgggtcaggactggagtgtg

SEQ ID NO: 3626 - RNA, 20 nt, synthetic construct
  source 1..20: mol_type = other RNA
caggactggagtgtggggcc

SEQ ID NO: 3627 - RNA, 20 nt, synthetic construct
  source 1..20: mol_type = other RNA
tgactgcagttagcaaagcc

SEQ ID NO: 3628 - RNA, 20 nt, synthetic construct
  source 1..20: mol_type = other RNA
gggtagggggtggagtgatg

SEQ ID NO: 3629 - RNA, 20 nt, synthetic construct
  source 1..20: mol_type = other RNA
cctggtgctggggtaggggg

SEQ ID NO: 3630 - RNA, 20 nt, synthetic construct
  source 1..20: mol_type = other RNA
gaccctggtgctggggtagg

SEQ ID NO: 3631 - RNA, 20 nt, synthetic construct
  source 1..20: mol_type = other RNA
tgaccctggtgctggggtag

SEQ ID NO: 3632 - RNA, 20 nt, synthetic construct
  source 1..20: mol_type = other RNA
ctgaccctggtgctggggta

SEQ ID NO: 3633 - RNA, 20 nt, synthetic construct
  source 1..20: mol_type = other RNA
cctgaccctggtgctggggt

SEQ ID NO: 3634 - RNA, 20 nt, synthetic construct
  source 1..20: mol_type = other RNA
ggaacctgaccctggtgctg

SEQ ID NO: 3635 - RNA, 20 nt, synthetic construct
  source 1..20: mol_type = other RNA
ccaccccctaccccagcacc

SEQ ID NO: 3636 - RNA, 20 nt, synthetic construct
  source 1..20: mol_type = other RNA
gggaacctgaccctggtgct

SEQ ID NO: 3637 - RNA, 20 nt, synthetic construct
  source 1..20: mol_type = other RNA
caccccctaccccagcacca

SEQ ID NO: 3638 - RNA, 20 nt, synthetic construct
  source 1..20: mol_type = other RNA
agggaacctgaccctggtgc

SEQ ID NO: 3639 - RNA, 20 nt, synthetic construct
  source 1..20: mol_type = other RNA
cctaccccagcaccagggtc

SEQ ID NO: 3640 - RNA, 20 nt, synthetic construct
  source 1..20: mol_type = other RNA
cctggaagggaacctgaccc

SEQ ID NO: 3641 - RNA, 20 nt, synthetic construct
  source 1..20: mol_type = other RNA
ccagggtcaggttcccttcc

SEQ ID NO: 3642 - RNA, 20 nt, synthetic construct
  source 1..20: mol_type = other RNA
ccaacaagtttttcctggaa

SEQ ID NO: 3643 - RNA, 20 nt, synthetic construct
  source 1..20: mol_type = other RNA
tccaacaagtttttcctgga

SEQ ID NO: 3644 - RNA, 20 nt, synthetic construct
  source 1..20: mol_type = other RNA
ggagtccaacaagtttttcc

SEQ ID NO: 3645 - RNA, 20 nt, synthetic construct
  source 1..20: mol_type = other RNA
cccttccaggaaaaacttgt

SEQ ID NO: 3646 - RNA, 20 nt, synthetic construct
  source 1..20: mol_type = other RNA
aacttgttggactcctttcc

SEQ ID NO: 3647 - RNA, 20 nt, synthetic construct
  source 1..20: mol_type = other RNA
ctgcagtcaatgacctggaa

SEQ ID NO: 3648 - RNA, 20 nt, synthetic construct
  source 1..20: mol_type = other RNA
cctaactgcagtcaatgacc

SEQ ID NO: 3649 - RNA, 20 nt, synthetic construct
  source 1..20: mol_type = other RNA
ccaggtcattgactgcagtt

SEQ ID NO: 3650 - RNA, 20 nt, synthetic construct
  source 1..20: mol_type = other RNA
tcattgactgcagttaggag

SEQ ID NO: 3651 - RNA, 20 nt, synthetic construct
  source 1..20: mol_type = other RNA
agttaggagtggcatgcaga

SEQ ID NO: 3652 - RNA, 20 nt, synthetic construct
  source 1..20: mol_type = other RNA
gttaggagtggcatgcagaa

SEQ ID NO: 3653 - RNA, 20 nt, synthetic construct
  source 1..20: mol_type = other RNA
aggagtggcatgcagaaggg

SEQ ID NO: 3654 - RNA, 20 nt, synthetic construct
  source 1..20: mol_type = other RNA
catgcagaagggaggctatc

SEQ ID NO: 3655 - RNA, 20 nt, synthetic construct
  source 1..20: mol_type = other RNA
gaagggaggctatctggagc

SEQ ID NO: 3656 - RNA, 20 nt, synthetic construct
  source 1..20: mol_type = other RNA
aagggaggctatctggagct

SEQ ID NO: 3657 - RNA, 20 nt, synthetic construct
  source 1..20: mol_type = other RNA
atctggagctgggacagacc

SEQ ID NO: 3658 - RNA, 20 nt, synthetic construct
  source 1..20: mol_type = other RNA
gctgggacagaccaggcaag

SEQ ID NO: 3659 - RNA, 20 nt, synthetic construct
  source 1..20: mol_type = other RNA
agttcccttccccgcttgcc

SEQ ID NO: 3660 - RNA, 20 nt, synthetic construct
  source 1..20: mol_type = other RNA
ctgggacagaccaggcaagc

SEQ ID NO: 3661 - RNA, 20 nt, synthetic construct
  source 1..20: mol_type = other RNA
tgggacagaccaggcaagcg

SEQ ID NO: 3662 - RNA, 20 nt, synthetic construct
  source 1..20: mol_type = other RNA
acagaccaggcaagcgggga

SEQ ID NO: 3663 - RNA, 20 nt, synthetic construct
  source 1..20: mol_type = other RNA
cagaccaggcaagcggggaa

SEQ ID NO: 3664 - RNA, 20 nt, synthetic construct
  source 1..20: mol_type = other RNA
cctgtccagaatgcagggtt

SEQ ID NO: 3665 - RNA, 20 nt, synthetic construct
  source 1..20: mol_type = other RNA
ccctgtccagaatgcagggt

SEQ ID NO: 3666 - RNA, 20 nt, synthetic construct
  source 1..20: mol_type = other RNA
cggtccctgtccagaatgca

SEQ ID NO: 3667 - RNA, 20 nt, synthetic construct
  source 1..20: mol_type = other RNA
cttatcccaaccctgcattc

SEQ ID NO: 3668 - RNA, 20 nt, synthetic construct
  source 1..20: mol_type = other RNA
tcggtccctgtccagaatgc

SEQ ID NO: 3669 - RNA, 20 nt, synthetic construct
  source 1..20: mol_type = other RNA
cccaaccctgcattctggac

SEQ ID NO: 3670 - RNA, 20 nt, synthetic construct
  source 1..20: mol_type = other RNA
ccaaccctgcattctggaca

SEQ ID NO: 3671 - RNA, 20 nt, synthetic construct
  source 1..20: mol_type = other RNA
gcattctggacagggaccga

SEQ ID NO: 3672 - RNA, 20 nt, synthetic construct
  source 1..20: mol_type = other RNA
agctgcagccaggagacctt

SEQ ID NO: 3673 - RNA, 20 nt, synthetic construct
  source 1..20: mol_type = other RNA
gacagggaccgaaggtctcc

SEQ ID NO: 3674 - RNA, 20 nt, synthetic construct
  source 1..20: mol_type = other RNA
gagctgtatgagctgcagcc

SEQ ID NO: 3675 - RNA, 20 nt, synthetic construct
  source 1..20: mol_type = other RNA
gctcatcttcattctcatcc

SEQ ID NO: 3676 - RNA, 20 nt, synthetic construct
  source 1..20: mol_type = other RNA
ctcatcttcattctcatcct

SEQ ID NO: 3677 - RNA, 20 nt, synthetic construct
  source 1..20: mol_type = other RNA
gtgaggggcctggtggtccc

SEQ ID NO: 3678 - RNA, 20 nt, synthetic construct
  source 1..20: mol_type = other RNA
attctcatcctgggaccacc

SEQ ID NO: 3679 - RNA, 20 nt, synthetic construct
  source 1..20: mol_type = other RNA
attgtgggtgaggggcctgg

SEQ ID NO: 3680 - RNA, 20 nt, synthetic construct
  source 1..20: mol_type = other RNA
gttattgtgggtgaggggcc

SEQ ID NO: 3681 - RNA, 20 nt, synthetic construct
  source 1..20: mol_type = other RNA
gtaaagttattgtgggtgag

SEQ ID NO: 3682 - RNA, 20 nt, synthetic construct
  source 1..20: mol_type = other RNA
ggtaaagttattgtgggtga

SEQ ID NO: 3683 - RNA, 20 nt, synthetic construct
  source 1..20: mol_type = other RNA
gggtaaagttattgtgggtg

SEQ ID NO: 3684 - RNA, 20 nt, synthetic construct
  source 1..20: mol_type = other RNA
gtaaagggtaaagttattgt

SEQ ID NO: 3685 - RNA, 20 nt, synthetic construct
  source 1..20: mol_type = other RNA
agtaaagggtaaagttattg

SEQ ID NO: 3686 - RNA, 20 nt, synthetic construct
  source 1..20: mol_type = other RNA
acaataactttaccctttac

SEQ ID NO: 3687 - RNA, 20 nt, synthetic construct
  source 1..20: mol_type = other RNA
cttgtgcatttgccagtaaa

SEQ ID NO: 3688 - RNA, 20 nt, synthetic construct
  source 1..20: mol_type = other RNA
gcttgtgcatttgccagtaa

SEQ ID NO: 3689 - RNA, 20 nt, synthetic construct
  source 1..20: mol_type = other RNA
ttactggcaaatgcacaagc

SEQ ID NO: 3690 - RNA, 20 nt, synthetic construct
  source 1..20: mol_type = other RNA
aatgcacaagctggagatga

SEQ ID NO: 3691 - RNA, 20 nt, synthetic construct
  source 1..20: mol_type = other RNA
gaaaatcttaaaactcgaat

SEQ ID NO: 3692 - RNA, 20 nt, synthetic construct
  source 1..20: mol_type = other RNA
ggaaaatcttaaaactcgaa

SEQ ID NO: 3693 - RNA, 20 nt, synthetic construct
  source 1..20: mol_type = other RNA
acactgacctcataacaact

SEQ ID NO: 3694 - RNA, 20 nt, synthetic construct
  source 1..20: mol_type = other RNA
agattttccaagttgttatg

SEQ ID NO: 3695 - RNA, 20 nt, synthetic construct
  source 1..20: mol_type = other RNA
atgaggtcagtgtcctcaat

SEQ ID NO: 3696 - RNA, 20 nt, synthetic construct
  source 1..20: mol_type = other RNA
tgaggtcagtgtcctcaatc

SEQ ID NO: 3697 - RNA, 20 nt, synthetic construct
  source 1..20: mol_type = other RNA
tcttctctgggtcccgattg

SEQ ID NO: 3698 - RNA, 20 nt, synthetic construct
  source 1..20: mol_type = other RNA
gcaagccacctatcttctct

SEQ ID NO: 3699 - RNA, 20 nt, synthetic construct
  source 1..20: mol_type = other RNA
ggcaagccacctatcttctc

SEQ ID NO: 3700 - RNA, 20 nt, synthetic construct
  source 1..20: mol_type = other RNA
aatcgggacccagagaagat

SEQ ID NO: 3701 - RNA, 20 nt, synthetic construct
  source 1..20: mol_type = other RNA
cgggacccagagaagatagg

SEQ ID NO: 3702 - RNA, 20 nt, synthetic construct
  source 1..20: mol_type = other RNA
gatgccccctctgaaagttc

SEQ ID NO: 3703 - RNA, 20 nt, synthetic construct
  source 1..20: mol_type = other RNA
tggcttgcctgaactttcag

SEQ ID NO: 3704 - RNA, 20 nt, synthetic construct
  source 1..20: mol_type = other RNA
ggcttgcctgaactttcaga

SEQ ID NO: 3705 - RNA, 20 nt, synthetic construct
  source 1..20: mol_type = other RNA
gcttgcctgaactttcagag

SEQ ID NO: 3706 - RNA, 20 nt, synthetic construct
  source 1..20: mol_type = other RNA
cttgcctgaactttcagagg

SEQ ID NO: 3707 - RNA, 20 nt, synthetic construct
  source 1..20: mol_type = other RNA
actttcagagggggcatctg

SEQ ID NO: 3708 - RNA, 20 nt, synthetic construct
  source 1..20: mol_type = other RNA
ggcatctgtggtgtcttttg

SEQ ID NO: 3709 - RNA, 20 nt, synthetic construct
  source 1..20: mol_type = other RNA
gcatctgtggtgtcttttgt

SEQ ID NO: 3710 - RNA, 20 nt, synthetic construct
  source 1..20: mol_type = other RNA
catctgtggtgtcttttgtg

SEQ ID NO: 3711 - RNA, 20 nt, synthetic construct
  source 1..20: mol_type = other RNA
tgtcttttgtggggtcctgt

SEQ ID NO: 3712 - RNA, 20 nt, synthetic construct
  source 1..20: mol_type = other RNA
gagggacgtggaaatcctac

SEQ ID NO: 3713 - RNA, 20 nt, synthetic construct
  source 1..20: mol_type = other RNA
tttttcctccaagagggacg

SEQ ID NO: 3714 - RNA, 20 nt, synthetic construct
  source 1..20: mol_type = other RNA
taggatttccacgtccctct

SEQ ID NO: 3715 - RNA, 20 nt, synthetic construct
  source 1..20: mol_type = other RNA
gatttccacgtccctcttgg

SEQ ID NO: 3716 - RNA, 20 nt, synthetic construct
  source 1..20: mol_type = other RNA
cttctatttttcctccaaga

SEQ ID NO: 3717 - RNA, 20 nt, synthetic construct
  source 1..20: mol_type = other RNA
acttctatttttcctccaag

SEQ ID NO: 3718 - RNA, 20 nt, synthetic construct
  source 1..20: mol_type = other RNA
aaatagaagtaagttgtctc

SEQ ID NO: 3719 - RNA, 20 nt, synthetic construct
  source 1..20: mol_type = other RNA
ttgtctcaggtcagattgtc

SEQ ID NO: 3720 - RNA, 20 nt, synthetic construct
  source 1..20: mol_type = other RNA
tgtctcaggtcagattgtct

SEQ ID NO: 3721 - RNA, 20 nt, synthetic construct
  source 1..20: mol_type = other RNA
gattgtctgggaagccaagt

SEQ ID NO: 3722 - RNA, 20 nt, synthetic construct
  source 1..20: mol_type = other RNA
gcaaatctccatctcctact

SEQ ID NO: 3723 - RNA, 20 nt, synthetic construct
  source 1..20: mol_type = other RNA
ctgggaagccaagtaggaga

SEQ ID NO: 3724 - RNA, 20 nt, synthetic construct
  source 1..20: mol_type = other RNA
ggagatggagatttgcatat

SEQ ID NO: 3725 - RNA, 20 nt, synthetic construct
  source 1..20: mol_type = other RNA
gatggagatttgcatatagg

SEQ ID NO: 3726 - RNA, 20 nt, synthetic construct
  source 1..20: mol_type = other RNA
tttgcatataggaggtttac

SEQ ID NO: 3727 - RNA, 20 nt, synthetic construct
  source 1..20: mol_type = other RNA
ttgcatataggaggtttact

SEQ ID NO: 3728 - RNA, 20 nt, synthetic construct
  source 1..20: mol_type = other RNA
tgcatataggaggtttactg

SEQ ID NO: 3729 - RNA, 20 nt, synthetic construct
  source 1..20: mol_type = other RNA
ggtttactggggacattcac

SEQ ID NO: 3730 - RNA, 20 nt, synthetic construct
  source 1..20: mol_type = other RNA
ttactggggacattcacagg

SEQ ID NO: 3731 - RNA, 20 nt, synthetic construct
  source 1..20: mol_type = other RNA
tactggggacattcacagga

SEQ ID NO: 3732 - RNA, 20 nt, synthetic construct
  source 1..20: mol_type = other RNA
tcacaggagggaacacccga

SEQ ID NO: 3733 - RNA, 20 nt, synthetic construct
  source 1..20: mol_type = other RNA
gctttcttcccttttccttc

SEQ ID NO: 3734 - RNA, 20 nt, synthetic construct
  source 1..20: mol_type = other RNA
tgctttcttcccttttcctt

SEQ ID NO: 3735 - RNA, 20 nt, synthetic construct
  source 1..20: mol_type = other RNA
gagggaacacccgaaggaaa

SEQ ID NO: 3736 - RNA, 20 nt, synthetic construct
  source 1..20: mol_type = other RNA
agggaacacccgaaggaaaa

SEQ ID NO: 3737 - RNA, 20 nt, synthetic construct
  source 1..20: mol_type = other RNA
gaaggaaaagggaagaaagc

SEQ ID NO: 3738 - RNA, 20 nt, synthetic construct
  source 1..20: mol_type = other RNA
aaggaaaagggaagaaagca

SEQ ID NO: 3739 - RNA, 20 nt, synthetic construct
  source 1..20: mol_type = other RNA
aaaagggaagaaagcagggt

SEQ ID NO: 3740 - RNA, 20 nt, synthetic construct
  source 1..20: mol_type = other RNA
aaagggaagaaagcagggtt

SEQ ID NO: 3741 - RNA, 20 nt, synthetic construct
  source 1..20: mol_type = other RNA
aagcagggttgggaagcagc

SEQ ID NO: 3742 - RNA, 20 nt, synthetic construct
  source 1..20: mol_type = other RNA
ttgggaagcagcaggagttg

SEQ ID NO: 3743 - RNA, 20 nt, synthetic construct
  source 1..20: mol_type = other RNA
gtgcaatgcagtcacaacag

SEQ ID NO: 3744 - RNA, 20 nt, synthetic construct
  source 1..20: mol_type = other RNA
ttgagtgctccctatgggat

SEQ ID NO: 3745 - RNA, 20 nt, synthetic construct
  source 1..20: mol_type = other RNA
gaggtcttagccaatcccat

SEQ ID NO: 3746 - RNA, 20 nt, synthetic construct
  source 1..20: mol_type = other RNA
aggtcttagccaatcccata

SEQ ID NO: 3747 - RNA, 20 nt, synthetic construct
  source 1..20: mol_type = other RNA
ccagcttgagtgctccctat

SEQ ID NO: 3748 - RNA, 20 nt, synthetic construct
  source 1..20: mol_type = other RNA
cccagcttgagtgctcccta

SEQ ID NO: 3749 - RNA, 20 nt, synthetic construct
  source 1..20: mol_type = other RNA
cccatagggagcactcaagc

SEQ ID NO: 3750 - RNA, 20 nt, synthetic construct
  source 1..20: mol_type = other RNA
ccatagggagcactcaagct

SEQ ID NO: 3751 - RNA, 20 nt, synthetic construct
  source 1..20: mol_type = other RNA
gcactcaagctgggacagca

SEQ ID NO: 3752 - RNA, 20 nt, synthetic construct
  source 1..20: mol_type = other RNA
gaggtagatgagggatgtga

SEQ ID NO: 3753 - RNA, 20 nt, synthetic construct
  source 1..20: mol_type = other RNA
gggaggacggaggtagatga

SEQ ID NO: 3754 - RNA, 20 nt, synthetic construct
  source 1..20: mol_type = other RNA
tgggaggacggaggtagatg

SEQ ID NO: 3755 - RNA, 20 nt, synthetic construct
  source 1..20: mol_type = other RNA
atgcctgtatgggaggacgg

SEQ ID NO: 3756 - RNA, 20 nt, synthetic construct
  source 1..20: mol_type = other RNA
gctatgcctgtatgggagga

SEQ ID NO: 3757 - RNA, 20 nt, synthetic construct
  source 1..20: mol_type = other RNA
ggaggctatgcctgtatggg

SEQ ID NO: 3758 - RNA, 20 nt, synthetic construct
  source 1..20: mol_type = other RNA
ctacctccgtcctcccatac

SEQ ID NO: 3759 - RNA, 20 nt, synthetic construct
  source 1..20: mol_type = other RNA
gggggaggctatgcctgtat

SEQ ID NO: 3760 - RNA, 20 nt, synthetic construct
  source 1..20: mol_type = other RNA
tgggggaggctatgcctgta

SEQ ID NO: 3761 - RNA, 20 nt, synthetic construct
  source 1..20: mol_type = other RNA
ctgagtgttcatcatggggg

SEQ ID NO: 3762 - RNA, 20 nt, synthetic construct
  source 1..20: mol_type = other RNA
gtgctgagtgttcatcatgg

SEQ ID NO: 3763 - RNA, 20 nt, synthetic construct
  source 1..20: mol_type = other RNA
ggtgctgagtgttcatcatg

SEQ ID NO: 3764 - RNA, 20 nt, synthetic construct
  source 1..20: mol_type = other RNA
tggtgctgagtgttcatcat

SEQ ID NO: 3765 - RNA, 20 nt, synthetic construct
  source 1..20: mol_type = other RNA
ctggtgctgagtgttcatca

SEQ ID NO: 3766 - RNA, 20 nt, synthetic construct
  source 1..20: mol_type = other RNA
ttataacaaatgtatcagtc

SEQ ID NO: 3767 - RNA, 20 nt, synthetic construct
  source 1..20: mol_type = other RNA
taataatgatgcatcaatgt

SEQ ID NO: 3768 - RNA, 20 nt, synthetic construct
  source 1..20: mol_type = other RNA
tgatgcatcattattaccca

SEQ ID NO: 3769 - RNA, 20 nt, synthetic construct
  source 1..20: mol_type = other RNA
gtaaacaaaccatggacctt

SEQ ID NO: 3770 - RNA, 20 nt, synthetic construct
  source 1..20: mol_type = other RNA
tgtaaacaaaccatggacct

SEQ ID NO: 3771 - RNA, 20 nt, synthetic construct
  source 1..20: mol_type = other RNA
tcattattacccaaggtcca

SEQ ID NO: 3772 - RNA, 20 nt, synthetic construct
  source 1..20: mol_type = other RNA
accctcatgtaaacaaacca

SEQ ID NO: 3773 - RNA, 20 nt, synthetic construct
  source 1..20: mol_type = other RNA
gtccatggtttgtttacatg

SEQ ID NO: 3774 - RNA, 20 nt, synthetic construct
  source 1..20: mol_type = other RNA
tccatggtttgtttacatga

SEQ ID NO: 3775 - RNA, 20 nt, synthetic construct
  source 1..20: mol_type = other RNA
tttacatgagggtttactct

SEQ ID NO: 3776 - RNA, 20 nt, synthetic construct
  source 1..20: mol_type = other RNA
tcttggtgttgtacattctg

SEQ ID NO: 3777 - RNA, 20 nt, synthetic construct
  source 1..20: mol_type = other RNA
cttggtgttgtacattctgt

SEQ ID NO: 3778 - RNA, 20 nt, synthetic construct
  source 1..20: mol_type = other RNA
tgttgtacattctgtgggtt

SEQ ID NO: 3779 - RNA, 20 nt, synthetic construct
  source 1..20: mol_type = other RNA
ggaggcaggttaaagaaaga

SEQ ID NO: 3780 - RNA, 20 nt, synthetic construct
  source 1..20: mol_type = other RNA
gcttctcagcagttggaggc

SEQ ID NO: 3781 - RNA, 20 nt, synthetic construct
  source 1..20: mol_type = other RNA
aagggcttctcagcagttgg

SEQ ID NO: 3782 - RNA, 20 nt, synthetic construct
  source 1..20: mol_type = other RNA
ccaaagggcttctcagcagt

SEQ ID NO: 3783 - RNA, 20 nt, synthetic construct
  source 1..20: mol_type = other RNA
ccaactgctgagaagccctt

SEQ ID NO: 3784 - RNA, 20 nt, synthetic construct
  source 1..20: mol_type = other RNA
ggctgcaatccctagccaaa

SEQ ID NO: 3785 - RNA, 20 nt, synthetic construct
  source 1..20: mol_type = other RNA
tgctgagaagccctttggct

SEQ ID NO: 3786 - RNA, 20 nt, synthetic construct
  source 1..20: mol_type = other RNA
tggctgcaatccctagccaa

SEQ ID NO: 3787 - RNA, 20 nt, synthetic construct
  source 1..20: mol_type = other RNA
gctgagaagccctttggcta

SEQ ID NO: 3788 - RNA, 20 nt, synthetic construct
  source 1..20: mol_type = other RNA
agtggaaaacaaattaaaat

SEQ ID NO: 3789 - RNA, 20 nt, synthetic construct
  source 1..20: mol_type = other RNA
gtaacttcagagcaggaaag

SEQ ID NO: 3790 - RNA, 20 nt, synthetic construct
  source 1..20: mol_type = other RNA
aaacaaagtaacttcagagc

SEQ ID NO: 3791 - RNA, 20 nt, synthetic construct
  source 1..20: mol_type = other RNA
gaagttactttgtttgccag

SEQ ID NO: 3792 - RNA, 20 nt, synthetic construct
  source 1..20: mol_type = other RNA
ttactttgtttgccagaggc

SEQ ID NO: 3793 - RNA, 20 nt, synthetic construct
  source 1..20: mol_type = other RNA
ggtttgaaccaaccagcctc

SEQ ID NO: 3794 - RNA, 20 nt, synthetic construct
  source 1..20: mol_type = other RNA
tttgtttgccagaggctggt

SEQ ID NO: 3795 - RNA, 20 nt, synthetic construct
  source 1..20: mol_type = other RNA
gctggttggttcaaacccaa

SEQ ID NO: 3796 - RNA, 20 nt, synthetic construct
  source 1..20: mol_type = other RNA
ctggttggttcaaacccaaa

SEQ ID NO: 3797 - RNA, 20 nt, synthetic construct
  source 1..20: mol_type = other RNA
attgcagctccctgcccttt

SEQ ID NO: 3798 - RNA, 20 nt, synthetic construct
  source 1..20: mol_type = other RNA
ttggttcaaacccaaagggc

SEQ ID NO: 3799 - RNA, 20 nt, synthetic construct
  source 1..20: mol_type = other RNA
cattgcagctccctgccctt

SEQ ID NO: 3800 - RNA, 20 nt, synthetic construct
  source 1..20: mol_type = other RNA
tggttcaaacccaaagggca

SEQ ID NO: 3801 - RNA, 20 nt, synthetic construct
  source 1..20: mol_type = other RNA
caaagggcagggagctgcaa

SEQ ID NO: 3802 - RNA, 20 nt, synthetic construct
  source 1..20: mol_type = other RNA
tgcaatggaaatccattcaa

SEQ ID NO: 3803 - RNA, 20 nt, synthetic construct
  source 1..20: mol_type = other RNA
ccaattccagcaccgttgaa

SEQ ID NO: 3804 - RNA, 20 nt, synthetic construct
  source 1..20: mol_type = other RNA
ggaaatccattcaacggtgc

SEQ ID NO: 3805 - RNA, 20 nt, synthetic construct
  source 1..20: mol_type = other RNA
ccattcaacggtgctggaat

SEQ ID NO: 3806 - RNA, 20 nt, synthetic construct
  source 1..20: mol_type = other RNA
cattcaacggtgctggaatt

SEQ ID NO: 3807 - RNA, 20 nt, synthetic construct
  source 1..20: mol_type = other RNA
caacggtgctggaattggga

SEQ ID NO: 3808 - RNA, 20 nt, synthetic construct
  source 1..20: mol_type = other RNA
ctggaattgggatggcaaaa

SEQ ID NO: 3809 - RNA, 20 nt, synthetic construct
  source 1..20: mol_type = other RNA
ggatggcaaaaaggagcagc

SEQ ID NO: 3810 - RNA, 20 nt, synthetic construct
  source 1..20: mol_type = other RNA
ggcaaaaaggagcagcaggc

SEQ ID NO: 3811 - RNA, 20 nt, synthetic construct
  source 1..20: mol_type = other RNA
agcagcaggcaggtgtcagc

SEQ ID NO: 3812 - RNA, 20 nt, synthetic construct
  source 1..20: mol_type = other RNA
gcagcaggcaggtgtcagca

SEQ ID NO: 3813 - RNA, 20 nt, synthetic construct
  source 1..20: mol_type = other RNA
gtaagctccctgggaactgt

SEQ ID NO: 3814 - RNA, 20 nt, synthetic construct
  source 1..20: mol_type = other RNA
ggtaagctccctgggaactg

SEQ ID NO: 3815 - RNA, 20 nt, synthetic construct
  source 1..20: mol_type = other RNA
ctttgcatcccacagttccc

SEQ ID NO: 3816 - RNA, 20 nt, synthetic construct
  source 1..20: mol_type = other RNA
tttgcatcccacagttccca

SEQ ID NO: 3817 - RNA, 20 nt, synthetic construct
  source 1..20: mol_type = other RNA
gaaagaatggtaagctccct

SEQ ID NO: 3818 - RNA, 20 nt, synthetic construct
  source 1..20: mol_type = other RNA
tgaaagaatggtaagctccc

SEQ ID NO: 3819 - RNA, 20 nt, synthetic construct
  source 1..20: mol_type = other RNA
tgaatgaatgaatgaaagaa

SEQ ID NO: 3820 - RNA, 20 nt, synthetic construct
  source 1..20: mol_type = other RNA
gactttgtctcataaatgaa

SEQ ID NO: 3821 - RNA, 20 nt, synthetic construct
  source 1..20: mol_type = other RNA
aaagtctcactctgttgccc

SEQ ID NO: 3822 - RNA, 20 nt, synthetic construct
  source 1..20: mol_type = other RNA
tctcactctgttgcccaggt

SEQ ID NO: 3823 - RNA, 20 nt, synthetic construct
  source 1..20: mol_type = other RNA
gtgccactgcactccaacct

SEQ ID NO: 3824 - RNA, 20 nt, synthetic construct
  source 1..20: mol_type = other RNA
tgtgccactgcactccaacc

SEQ ID NO: 3825 - RNA, 20 nt, synthetic construct
  source 1..20: mol_type = other RNA
ttgcccaggttggagtgcag

SEQ ID NO: 3826 - RNA, 20 nt, synthetic construct
  source 1..20: mol_type = other RNA
ggcttgagctcaggagcttg

SEQ ID NO: 3827 - RNA, 20 nt, synthetic construct
  source 1..20: mol_type = other RNA
caggaggatggcttgagctc

SEQ ID NO: 3828 - RNA, 20 nt, synthetic construct
  source 1..20: mol_type = other RNA
gggaggctgaggcaggagga

SEQ ID NO: 3829 - RNA, 20 nt, synthetic construct
  source 1..20: mol_type = other RNA
acttgggaggctgaggcagg

SEQ ID NO: 3830 - RNA, 20 nt, synthetic construct
  source 1..20: mol_type = other RNA
gctacttgggaggctgaggc

SEQ ID NO: 3831 - RNA, 20 nt, synthetic construct
  source 1..20: mol_type = other RNA
ctcggctacttgggaggctg

SEQ ID NO: 3832 - RNA, 20 nt, synthetic construct
  source 1..20: mol_type = other RNA
tgtagtctcggctacttggg

SEQ ID NO: 3833 - RNA, 20 nt, synthetic construct
  source 1..20: mol_type = other RNA
ccttgtagtctcggctactt

SEQ ID NO: 3834 - RNA, 20 nt, synthetic construct
  source 1..20: mol_type = other RNA
cccttgtagtctcggctact

SEQ ID NO: 3835 - RNA, 20 nt, synthetic construct
  source 1..20: mol_type = other RNA
gtggagtgcccttgtagtct

SEQ ID NO: 3836 - RNA, 20 nt, synthetic construct
  source 1..20: mol_type = other RNA
cccaagtagccgagactaca

SEQ ID NO: 3837 - RNA, 20 nt, synthetic construct
  source 1..20: mol_type = other RNA
ccaagtagccgagactacaa

SEQ ID NO: 3838 - RNA, 20 nt, synthetic construct
  source 1..20: mol_type = other RNA
caaaaattagctgggtgtgg

SEQ ID NO: 3839 - RNA, 20 nt, synthetic construct
  source 1..20: mol_type = other RNA
atacaaaaattagctgggtg

SEQ ID NO: 3840 - RNA, 20 nt, synthetic construct
  source 1..20: mol_type = other RNA
aaaagatacaaaaattagct

SEQ ID NO: 3841 - RNA, 20 nt, synthetic construct
  source 1..20: mol_type = other RNA
taaaagatacaaaaattagc

SEQ ID NO: 3842 - RNA, 20 nt, synthetic construct
  source 1..20: mol_type = other RNA
atcttttatttctgaagaga

SEQ ID NO: 3843 - RNA, 20 nt, synthetic construct
  source 1..20: mol_type = other RNA
tcttttatttctgaagagat

SEQ ID NO: 3844 - RNA, 20 nt, synthetic construct
  source 1..20: mol_type = other RNA
cttttatttctgaagagatg

SEQ ID NO: 3845 - RNA, 20 nt, synthetic construct
  source 1..20: mol_type = other RNA
ggggtttcactatgttgccc

SEQ ID NO: 3846 - RNA, 20 nt, synthetic construct
  source 1..20: mol_type = other RNA
tttcactatgttgcccaggc

SEQ ID NO: 3847 - RNA, 20 nt, synthetic construct
  source 1..20: mol_type = other RNA
caggagtttgagaccagcct

SEQ ID NO: 3848 - RNA, 20 nt, synthetic construct
  source 1..20: mol_type = other RNA
ccaggagtttgagaccagcc

SEQ ID NO: 3849 - RNA, 20 nt, synthetic construct
  source 1..20: mol_type = other RNA
ccaggctggtctcaaactcc

SEQ ID NO: 3850 - RNA, 20 nt, synthetic construct
  source 1..20: mol_type = other RNA
agggaggatgacttgaggcc

SEQ ID NO: 3851 - RNA, 20 nt, synthetic construct
  source 1..20: mol_type = other RNA
tgaggagggaggatgacttg

SEQ ID NO: 3852 - RNA, 20 nt, synthetic construct
  source 1..20: mol_type = other RNA
ctttgggaggctgaggaggg

SEQ ID NO: 3853 - RNA, 20 nt, synthetic construct
  source 1..20: mol_type = other RNA
gcactttgggaggctgagga

SEQ ID NO: 3854 - RNA, 20 nt, synthetic construct
  source 1..20: mol_type = other RNA
agcactttgggaggctgagg

SEQ ID NO: 3855 - RNA, 20 nt, synthetic construct
  source 1..20: mol_type = other RNA
cccagcactttgggaggctg

SEQ ID NO: 3856 - RNA, 20 nt, synthetic construct
  source 1..20: mol_type = other RNA
tgtaatcccagcactttggg

SEQ ID NO: 3857 - RNA, 20 nt, synthetic construct
  source 1..20: mol_type = other RNA
acctgtaatcccagcacttt

SEQ ID NO: 3858 - RNA, 20 nt, synthetic construct
  source 1..20: mol_type = other RNA
tcctcagcctcccaaagtgc

SEQ ID NO: 3859 - RNA, 20 nt, synthetic construct
  source 1..20: mol_type = other RNA
cacctgtaatcccagcactt

SEQ ID NO: 3860 - RNA, 20 nt, synthetic construct
  source 1..20: mol_type = other RNA
cctcagcctcccaaagtgct

SEQ ID NO: 3861 - RNA, 20 nt, synthetic construct
  source 1..20: mol_type = other RNA
tcccaaagtgctgggattac

SEQ ID NO: 3862 - RNA, 20 nt, synthetic construct
  source 1..20: mol_type = other RNA
cagatggaaaggtgattaag

SEQ ID NO: 3863 - RNA, 20 nt, synthetic construct
  source 1..20: mol_type = other RNA
tgctgccagctcagatggaa

SEQ ID NO: 3864 - RNA, 20 nt, synthetic construct
  source 1..20: mol_type = other RNA
agctctgctgccagctcaga

SEQ ID NO: 3865 - RNA, 20 nt, synthetic construct
  source 1..20: mol_type = other RNA
aatcacctttccatctgagc

SEQ ID NO: 3866 - RNA, 20 nt, synthetic construct
  source 1..20: mol_type = other RNA
atctgagctggcagcagagc

SEQ ID NO: 3867 - RNA, 20 nt, synthetic construct
  source 1..20: mol_type = other RNA
tctgagctggcagcagagct

SEQ ID NO: 3868 - RNA, 20 nt, synthetic construct
  source 1..20: mol_type = other RNA
gttgcagcatctggggtgtt

SEQ ID NO: 3869 - RNA, 20 nt, synthetic construct
  source 1..20: mol_type = other RNA
agttgcagcatctggggtgt

SEQ ID NO: 3870 - RNA, 20 nt, synthetic construct
  source 1..20: mol_type = other RNA
cactaaagttgcagcatctg

SEQ ID NO: 3871 - RNA, 20 nt, synthetic construct
  source 1..20: mol_type = other RNA
gcactaaagttgcagcatct

SEQ ID NO: 3872 - RNA, 20 nt, synthetic construct
  source 1..20: mol_type = other RNA
agcactaaagttgcagcatc

SEQ ID NO: 3873 - RNA, 20 nt, synthetic construct
  source 1..20: mol_type = other RNA
gttccacacagagaaggagc

SEQ ID NO: 3874 - RNA, 20 nt, synthetic construct
  source 1..20: mol_type = other RNA
aggccagttccacacagaga

SEQ ID NO: 3875 - RNA, 20 nt, synthetic construct
  source 1..20: mol_type = other RNA
cttcctgctccttctctgtg

SEQ ID NO: 3876 - RNA, 20 nt, synthetic construct
  source 1..20: mol_type = other RNA
gctccttctctgtgtggaac

SEQ ID NO: 3877 - RNA, 20 nt, synthetic construct
  source 1..20: mol_type = other RNA
ctgtgtggaactggcctgtt

SEQ ID NO: 3878 - RNA, 20 nt, synthetic construct
  source 1..20: mol_type = other RNA
tgtgtggaactggcctgttt

SEQ ID NO: 3879 - RNA, 20 nt, synthetic construct
  source 1..20: mol_type = other RNA
ctggccctgggtacccaaac

SEQ ID NO: 3880 - RNA, 20 nt, synthetic construct
  source 1..20: mol_type = other RNA
actggcctgtttgggtaccc

SEQ ID NO: 3881 - RNA, 20 nt, synthetic construct
  source 1..20: mol_type = other RNA
ctggcctgtttgggtaccca

SEQ ID NO: 3882 - RNA, 20 nt, synthetic construct
  source 1..20: mol_type = other RNA
tcttggaggggactggccct

SEQ ID NO: 3883 - RNA, 20 nt, synthetic construct
  source 1..20: mol_type = other RNA
gtcttggaggggactggccc

SEQ ID NO: 3884 - RNA, 20 nt, synthetic construct
  source 1..20: mol_type = other RNA
cagagggtcttggaggggac

SEQ ID NO: 3885 - RNA, 20 nt, synthetic construct
  source 1..20: mol_type = other RNA
ttctacagagggtcttggag

SEQ ID NO: 3886 - RNA, 20 nt, synthetic construct
  source 1..20: mol_type = other RNA
tttctacagagggtcttgga

SEQ ID NO: 3887 - RNA, 20 nt, synthetic construct
  source 1..20: mol_type = other RNA
ttttctacagagggtcttgg

SEQ ID NO: 3888 - RNA, 20 nt, synthetic construct
  source 1..20: mol_type = other RNA
tctttttctacagagggtct

SEQ ID NO: 3889 - RNA, 20 nt, synthetic construct
  source 1..20: mol_type = other RNA
gtagggtctttttctacaga

SEQ ID NO: 3890 - RNA, 20 nt, synthetic construct
  source 1..20: mol_type = other RNA
agtagggtctttttctacag

SEQ ID NO: 3891 - RNA, 20 nt, synthetic construct
  source 1..20: mol_type = other RNA
tggaattgaggtgtacagta

SEQ ID NO: 3892 - RNA, 20 nt, synthetic construct
  source 1..20: mol_type = other RNA
atggaattgaggtgtacagt

SEQ ID NO: 3893 - RNA, 20 nt, synthetic construct
  source 1..20: mol_type = other RNA
cctgtcctgcaatggaattg

SEQ ID NO: 3894 - RNA, 20 nt, synthetic construct
  source 1..20: mol_type = other RNA
gtacacctcaattccattgc

SEQ ID NO: 3895 - RNA, 20 nt, synthetic construct
  source 1..20: mol_type = other RNA
aattatgtcctgtcctgcaa

SEQ ID NO: 3896 - RNA, 20 nt, synthetic construct
  source 1..20: mol_type = other RNA
cctcaattccattgcaggac

SEQ ID NO: 3897 - RNA, 20 nt, synthetic construct
  source 1..20: mol_type = other RNA
tgactggggcagggagaggc

SEQ ID NO: 3898 - RNA, 20 nt, synthetic construct
  source 1..20: mol_type = other RNA
tgggtgactggggcagggag

SEQ ID NO: 3899 - RNA, 20 nt, synthetic construct
  source 1..20: mol_type = other RNA
agggatgggtgactggggca

SEQ ID NO: 3900 - RNA, 20 nt, synthetic construct
  source 1..20: mol_type = other RNA
gagggatgggtgactggggc

SEQ ID NO: 3901 - RNA, 20 nt, synthetic construct
  source 1..20: mol_type = other RNA
ttgggagggatgggtgactg

SEQ ID NO: 3902 - RNA, 20 nt, synthetic construct
  source 1..20: mol_type = other RNA
cttgggagggatgggtgact

SEQ ID NO: 3903 - RNA, 20 nt, synthetic construct
  source 1..20: mol_type = other RNA
gcttgggagggatgggtgac

SEQ ID NO: 3904 - RNA, 20 nt, synthetic construct
  source 1..20: mol_type = other RNA
gataatggcttgggagggat

SEQ ID NO: 3905 - RNA, 20 nt, synthetic construct
  source 1..20: mol_type = other RNA
agataatggcttgggaggga

SEQ ID NO: 3906 - RNA, 20 nt, synthetic construct
  source 1..20: mol_type = other RNA
cccaagataatggcttggga

SEQ ID NO: 3907 - RNA, 20 nt, synthetic construct
  source 1..20: mol_type = other RNA
tcccaagataatggcttggg

SEQ ID NO: 3908 - RNA, 20 nt, synthetic construct
  source 1..20: mol_type = other RNA
aggtcccaagataatggctt

SEQ ID NO: 3909 - RNA, 20 nt, synthetic construct
  source 1..20: mol_type = other RNA
caggtcccaagataatggct

SEQ ID NO: 3910 - RNA, 20 nt, synthetic construct
  source 1..20: mol_type = other RNA
tccctcccaagccattatct

SEQ ID NO: 3911 - RNA, 20 nt, synthetic construct
  source 1..20: mol_type = other RNA
ccttgcaggtcccaagataa

SEQ ID NO: 3912 - RNA, 20 nt, synthetic construct
  source 1..20: mol_type = other RNA
ccctcccaagccattatctt

SEQ ID NO: 3913 - RNA, 20 nt, synthetic construct
  source 1..20: mol_type = other RNA
ccattatcttgggacctgca

SEQ ID NO: 3914 - RNA, 20 nt, synthetic construct
  source 1..20: mol_type = other RNA
cattatcttgggacctgcaa

SEQ ID NO: 3915 - RNA, 20 nt, synthetic construct
  source 1..20: mol_type = other RNA
cttggcttggaggcccttgc

SEQ ID NO: 3916 - RNA, 20 nt, synthetic construct
  source 1..20: mol_type = other RNA
atttgccacccttggcttgg

SEQ ID NO: 3917 - RNA, 20 nt, synthetic construct
  source 1..20: mol_type = other RNA
ctgcaagggcctccaagcca

SEQ ID NO: 3918 - RNA, 20 nt, synthetic construct
  source 1..20: mol_type = other RNA
tgcaagggcctccaagccaa

SEQ ID NO: 3919 - RNA, 20 nt, synthetic construct
  source 1..20: mol_type = other RNA
tggatttgccacccttggct

SEQ ID NO: 3920 - RNA, 20 nt, synthetic construct
  source 1..20: mol_type = other RNA
aagggcctccaagccaaggg

SEQ ID NO: 3921 - RNA, 20 nt, synthetic construct
  source 1..20: mol_type = other RNA
gtatttggatttgccaccct

SEQ ID NO: 3922 - RNA, 20 nt, synthetic construct
  source 1..20: mol_type = other RNA
attatggcccctttggtatt

SEQ ID NO: 3923 - RNA, 20 nt, synthetic construct
  source 1..20: mol_type = other RNA
gtggcaaatccaaataccaa

SEQ ID NO: 3924 - RNA, 20 nt, synthetic construct
  source 1..20: mol_type = other RNA
tggcaaatccaaataccaaa

SEQ ID NO: 3925 - RNA, 20 nt, synthetic construct
  source 1..20: mol_type = other RNA
ggcaaatccaaataccaaag

SEQ ID NO: 3926 - RNA, 20 nt, synthetic construct
  source 1..20: mol_type = other RNA
ttacatcattatggcccctt

SEQ ID NO: 3927 - RNA, 20 nt, synthetic construct
  source 1..20: mol_type = other RNA
ggacacattttacatcatta

SEQ ID NO: 3928 - RNA, 20 nt, synthetic construct
  source 1..20: mol_type = other RNA
taatgatgtaaaatgtgtcc

SEQ ID NO: 3929 - RNA, 20 nt, synthetic construct
  source 1..20: mol_type = other RNA
gtaaaatgtgtccaggcaga

SEQ ID NO: 3930 - RNA, 20 nt, synthetic construct
  source 1..20: mol_type = other RNA
actccctattgccttctgcc

SEQ ID NO: 3931 - RNA, 20 nt, synthetic construct
  source 1..20: mol_type = other RNA
gtgtccaggcagaaggcaat

SEQ ID NO: 3932 - RNA, 20 nt, synthetic construct
  source 1..20: mol_type = other RNA
tgtccaggcagaaggcaata

SEQ ID NO: 3933 - RNA, 20 nt, synthetic construct
  source 1..20: mol_type = other RNA
cagaaggcaatagggagtag

SEQ ID NO: 3934 - RNA, 20 nt, synthetic construct
  source 1..20: mol_type = other RNA
agaaggcaatagggagtagt

SEQ ID NO: 3935 - RNA, 20 nt, synthetic construct
  source 1..20: mol_type = other RNA
gaaggcaatagggagtagtg

SEQ ID NO: 3936 - RNA, 20 nt, synthetic construct
  source 1..20: mol_type = other RNA
atagggagtagtggggcctc

SEQ ID NO: 3937 - RNA, 20 nt, synthetic construct
  source 1..20: mol_type = other RNA
gtacacacaattgttaccag

SEQ ID NO: 3938 - RNA, 20 nt, synthetic construct
  source 1..20: mol_type = other RNA
tctatatagagacattgtga

SEQ ID NO: 3939 - RNA, 20 nt, synthetic construct
  source 1..20: mol_type = other RNA
agacacacacacacttatat

SEQ ID NO: 3940 - RNA, 20 nt, synthetic construct
  source 1..20: mol_type = other RNA
cacacacacttatattggct

SEQ ID NO: 3941 - RNA, 20 nt, synthetic construct
  source 1..20: mol_type = other RNA
acacacacttatattggctt

SEQ ID NO: 3942 - RNA, 20 nt, synthetic construct
  source 1..20: mol_type = other RNA
gcttgggaaacaaaacaaat

SEQ ID NO: 3943 - RNA, 20 nt, synthetic construct
  source 1..20: mol_type = other RNA
aaacaaataggcctatcgac

SEQ ID NO: 3944 - RNA, 20 nt, synthetic construct
  source 1..20: mol_type = other RNA
aaaagttgaatccagtcgat

SEQ ID NO: 3945 - RNA, 20 nt, synthetic construct
  source 1..20: mol_type = other RNA
tcagctgtgccacaggggct

SEQ ID NO: 3946 - RNA, 20 nt, synthetic construct
  source 1..20: mol_type = other RNA
attttgcagccaagcccctg

SEQ ID NO: 3947 - RNA, 20 nt, synthetic construct
  source 1..20: mol_type = other RNA
gctcctcagctgtgccacag

SEQ ID NO: 3948 - RNA, 20 nt, synthetic construct
  source 1..20: mol_type = other RNA
agctcctcagctgtgccaca

SEQ ID NO: 3949 - RNA, 20 nt, synthetic construct
  source 1..20: mol_type = other RNA
aagctcctcagctgtgccac

SEQ ID NO: 3950 - RNA, 20 nt, synthetic construct
  source 1..20: mol_type = other RNA
aagcccctgtggcacagctg

SEQ ID NO: 3951 - RNA, 20 nt, synthetic construct
  source 1..20: mol_type = other RNA
ggcacagctgaggagcttgc

SEQ ID NO: 3952 - RNA, 20 nt, synthetic construct
  source 1..20: mol_type = other RNA
gaggagcttgcaggtcagaa

SEQ ID NO: 3953 - RNA, 20 nt, synthetic construct
  source 1..20: mol_type = other RNA
aggagcttgcaggtcagaaa

SEQ ID NO: 3954 - RNA, 20 nt, synthetic construct
  source 1..20: mol_type = other RNA
ggagcttgcaggtcagaaag

SEQ ID NO: 3955 - RNA, 20 nt, synthetic construct
  source 1..20: mol_type = other RNA
ctggagatattgctattggt

SEQ ID NO: 3956 - RNA, 20 nt, synthetic construct
  source 1..20: mol_type = other RNA
aggtctggagatattgctat

SEQ ID NO: 3957 - RNA, 20 nt, synthetic construct
  source 1..20: mol_type = other RNA
gcttcgtgtcaggagaggtc

SEQ ID NO: 3958 - RNA, 20 nt, synthetic construct
  source 1..20: mol_type = other RNA
gatgagcttcgtgtcaggag

SEQ ID NO: 3959 - RNA, 20 nt, synthetic construct
  source 1..20: mol_type = other RNA
ggtcagatgagcttcgtgtc

SEQ ID NO: 3960 - RNA, 20 nt, synthetic construct
  source 1..20: mol_type = other RNA
atgtgtgtaatgggggcagg

SEQ ID NO: 3961 - RNA, 20 nt, synthetic construct
  source 1..20: mol_type = other RNA
tgtatgtgtgtaatgggggc

SEQ ID NO: 3962 - RNA, 20 nt, synthetic construct
  source 1..20: mol_type = other RNA
catgtgtatgtgtgtaatgg

SEQ ID NO: 3963 - RNA, 20 nt, synthetic construct
  source 1..20: mol_type = other RNA
gcatgtgtatgtgtgtaatg

SEQ ID NO: 3964 - RNA, 20 nt, synthetic construct
  source 1..20: mol_type = other RNA
tgcatgtgtatgtgtgtaat

SEQ ID NO: 3965 - RNA, 20 nt, synthetic construct
  source 1..20: mol_type = other RNA
gtgcatgtgtatgtgtgtaa

SEQ ID NO: 3966 - RNA, 20 nt, synthetic construct
  source 1..20: mol_type = other RNA
acatgcacacacatgcatgc

SEQ ID NO: 3967 - RNA, 20 nt, synthetic construct
  source 1..20: mol_type = other RNA
gatcatttgtcctcaaggca

SEQ ID NO: 3968 - RNA, 20 nt, synthetic construct
  source 1..20: mol_type = other RNA
cttctagtctccctgccttg

SEQ ID NO: 3969 - RNA, 20 nt, synthetic construct
  source 1..20: mol_type = other RNA
tgatcatttgtcctcaaggc

SEQ ID NO: 3970 - RNA, 20 nt, synthetic construct
  source 1..20: mol_type = other RNA
gatctgatcatttgtcctca

SEQ ID NO: 3971 - RNA, 20 nt, synthetic construct
  source 1..20: mol_type = other RNA
atgggcctggaaacagttgc

SEQ ID NO: 3972 - RNA, 20 nt, synthetic construct
  source 1..20: mol_type = other RNA
cagatcctgcaactgtttcc

SEQ ID NO: 3973 - RNA, 20 nt, synthetic construct
  source 1..20: mol_type = other RNA
tgctcaggggcttatgggcc

SEQ ID NO: 3974 - RNA, 20 nt, synthetic construct
  source 1..20: mol_type = other RNA
tgcaatgctcaggggcttat

SEQ ID NO: 3975 - RNA, 20 nt, synthetic construct
  source 1..20: mol_type = other RNA
ctgcaatgctcaggggctta

SEQ ID NO: 3976 - RNA, 20 nt, synthetic construct
  source 1..20: mol_type = other RNA
agcaacactgcaatgctcag

SEQ ID NO: 3977 - RNA, 20 nt, synthetic construct
  source 1..20: mol_type = other RNA
tagcaacactgcaatgctca

SEQ ID NO: 3978 - RNA, 20 nt, synthetic construct
  source 1..20: mol_type = other RNA
gtagcaacactgcaatgctc

SEQ ID NO: 3979 - RNA, 20 nt, synthetic construct
  source 1..20: mol_type = other RNA
aggagacggagaggaaacta

SEQ ID NO: 3980 - RNA, 20 nt, synthetic construct
  source 1..20: mol_type = other RNA
ggaggtcacaggagacggag

SEQ ID NO: 3981 - RNA, 20 nt, synthetic construct
  source 1..20: mol_type = other RNA
cacgaggaggtcacaggaga

SEQ ID NO: 3982 - RNA, 20 nt, synthetic construct
  source 1..20: mol_type = other RNA
gagtggcacgaggaggtcac

SEQ ID NO: 3983 - RNA, 20 nt, synthetic construct
  source 1..20: mol_type = other RNA
cttcctggagtggcacgagg

SEQ ID NO: 3984 - RNA, 20 nt, synthetic construct
  source 1..20: mol_type = other RNA
tcacttcctggagtggcacg

SEQ ID NO: 3985 - RNA, 20 nt, synthetic construct
  source 1..20: mol_type = other RNA
tgacctcctcgtgccactcc

SEQ ID NO: 3986 - RNA, 20 nt, synthetic construct
  source 1..20: mol_type = other RNA
aagactttcacttcctggag

SEQ ID NO: 3987 - RNA, 20 nt, synthetic construct
  source 1..20: mol_type = other RNA
cactcaagactttcacttcc

SEQ ID NO: 3988 - RNA, 20 nt, synthetic construct
  source 1..20: mol_type = other RNA
gaggacttaagagaaactac

SEQ ID NO: 3989 - RNA, 20 nt, synthetic construct
  source 1..20: mol_type = other RNA
caggagaacgagacagagag

SEQ ID NO: 3990 - RNA, 20 nt, synthetic construct
  source 1..20: mol_type = other RNA
ctctctctgtctcgttctcc

SEQ ID NO: 3991 - RNA, 20 nt, synthetic construct
  source 1..20: mol_type = other RNA
tctctctgtctcgttctcct

SEQ ID NO: 3992 - RNA, 20 nt, synthetic construct
  source 1..20: mol_type = other RNA
aaaccaagtgtagatatccc

SEQ ID NO: 3993 - RNA, 20 nt, synthetic construct
  source 1..20: mol_type = other RNA
tctcctgggatatctacact

SEQ ID NO: 3994 - RNA, 20 nt, synthetic construct
  source 1..20: mol_type = other RNA
acacttggtttgcaaacagc

SEQ ID NO: 3995 - RNA, 20 nt, synthetic construct
  source 1..20: mol_type = other RNA
ttggtttgcaaacagcaggc

SEQ ID NO: 3996 - RNA, 20 nt, synthetic construct
  source 1..20: mol_type = other RNA
aaacagcaggctggagagtg

SEQ ID NO: 3997 - RNA, 20 nt, synthetic construct
  source 1..20: mol_type = other RNA
aacagcaggctggagagtga

SEQ ID NO: 3998 - RNA, 20 nt, synthetic construct
  source 1..20: mol_type = other RNA
acagcaggctggagagtgag

SEQ ID NO: 3999 - RNA, 20 nt, synthetic construct
  source 1..20: mol_type = other RNA
gggggaggagctggatgtag

SEQ ID NO: 4000 - RNA, 20 nt, synthetic construct
  source 1..20: mol_type = other RNA
gagcaggatgggggaggagc

SEQ ID NO: 4001 - RNA, 20 nt, synthetic construct
  source 1..20: mol_type = other RNA
gacttggagcaggatggggg

SEQ ID NO: 4002 - RNA, 20 nt, synthetic construct
  source 1..20: mol_type = other RNA
ctggacttggagcaggatgg

SEQ ID NO: 4003 - RNA, 20 nt, synthetic construct
  source 1..20: mol_type = other RNA
gctggacttggagcaggatg

SEQ ID NO: 4004 - RNA, 20 nt, synthetic construct
  source 1..20: mol_type = other RNA
tgctggacttggagcaggat

SEQ ID NO: 4005 - RNA, 20 nt, synthetic construct
  source 1..20: mol_type = other RNA
atgctggacttggagcagga

SEQ ID NO: 4006 - RNA, 20 nt, synthetic construct
  source 1..20: mol_type = other RNA
gaacatgctggacttggagc

SEQ ID NO: 4007 - RNA, 20 nt, synthetic construct
  source 1..20: mol_type = other RNA
agataggaacatgctggact

SEQ ID NO: 4008 - RNA, 20 nt, synthetic construct
  source 1..20: mol_type = other RNA
gggaagagataggaacatgc

SEQ ID NO: 4009 - RNA, 20 nt, synthetic construct
  source 1..20: mol_type = other RNA
cagggtcctggggaagagat

SEQ ID NO: 4010 - RNA, 20 nt, synthetic construct
  source 1..20: mol_type = other RNA
catgttcctatctcttcccc

SEQ ID NO: 4011 - RNA, 20 nt, synthetic construct
  source 1..20: mol_type = other RNA
cccaagagcccagggtcctg

SEQ ID NO: 4012 - RNA, 20 nt, synthetic construct
  source 1..20: mol_type = other RNA
gcccaagagcccagggtcct

SEQ ID NO: 4013 - RNA, 20 nt, synthetic construct
  source 1..20: mol_type = other RNA
ctatctcttccccaggaccc

SEQ ID NO: 4014 - RNA, 20 nt, synthetic construct
  source 1..20: mol_type = other RNA
tgcccaagagcccagggtcc

SEQ ID NO: 4015 - RNA, 20 nt, synthetic construct
  source 1..20: mol_type = other RNA
tatctcttccccaggaccct

SEQ ID NO: 4016 - RNA, 20 nt, synthetic construct
  source 1..20: mol_type = other RNA
gatttgtgcccaagagccca

SEQ ID NO: 4017 - RNA, 20 nt, synthetic construct
  source 1..20: mol_type = other RNA
tgatttgtgcccaagagccc

SEQ ID NO: 4018 - RNA, 20 nt, synthetic construct
  source 1..20: mol_type = other RNA
tccccaggaccctgggctct

SEQ ID NO: 4019 - RNA, 20 nt, synthetic construct
  source 1..20: mol_type = other RNA
ccccaggaccctgggctctt

SEQ ID NO: 4020 - RNA, 20 nt, synthetic construct
  source 1..20: mol_type = other RNA
ccccacaggctgtctggtga

SEQ ID NO: 4021 - RNA, 20 nt, synthetic construct
  source 1..20: mol_type = other RNA
ttgccaccccacaggctgtc

SEQ ID NO: 4022 - RNA, 20 nt, synthetic construct
  source 1..20: mol_type = other RNA
agccatcaccagacagcctg

SEQ ID NO: 4023 - RNA, 20 nt, synthetic construct
  source 1..20: mol_type = other RNA
gccatcaccagacagcctgt

SEQ ID NO: 4024 - RNA, 20 nt, synthetic construct
  source 1..20: mol_type = other RNA
ccatcaccagacagcctgtg

SEQ ID NO: 4025 - RNA, 20 nt, synthetic construct
  source 1..20: mol_type = other RNA
tcaccagacagcctgtgggg

SEQ ID NO: 4026 - RNA, 20 nt, synthetic construct
  source 1..20: mol_type = other RNA
ctctgctcttgccaccccac

SEQ ID NO: 4027 - RNA, 20 nt, synthetic construct
  source 1..20: mol_type = other RNA
ctgtggggtggcaagagcag

SEQ ID NO: 4028 - RNA, 20 nt, synthetic construct
  source 1..20: mol_type = other RNA
gtttctttgtgaacatctat

SEQ ID NO: 4029 - RNA, 20 nt, synthetic construct
  source 1..20: mol_type = other RNA
tgtgaacatctataggtacc

SEQ ID NO: 4030 - RNA, 20 nt, synthetic construct
  source 1..20: mol_type = other RNA
aatagggcctgcacagagcc

SEQ ID NO: 4031 - RNA, 20 nt, synthetic construct
  source 1..20: mol_type = other RNA
ataggtaccaggctctgtgc

SEQ ID NO: 4032 - RNA, 20 nt, synthetic construct
  source 1..20: mol_type = other RNA
ctctgtgcaggccctattgt

SEQ ID NO: 4033 - RNA, 20 nt, synthetic construct
  source 1..20: mol_type = other RNA
tctatggctcaccaacaata

SEQ ID NO: 4034 - RNA, 20 nt, synthetic construct
  source 1..20: mol_type = other RNA
ctctatggctcaccaacaat

SEQ ID NO: 4035 - RNA, 20 nt, synthetic construct
  source 1..20: mol_type = other RNA
ctattgttggtgagccatag

SEQ ID NO: 4036 - RNA, 20 nt, synthetic construct
  source 1..20: mol_type = other RNA
gggtgaggttggtacctcta

SEQ ID NO: 4037 - RNA, 20 nt, synthetic construct
  source 1..20: mol_type = other RNA
gaggattcatggggtgaggt

SEQ ID NO: 4038 - RNA, 20 nt, synthetic construct
  source 1..20: mol_type = other RNA
aaaggaggattcatggggtg

SEQ ID NO: 4039 - RNA, 20 nt, synthetic construct
  source 1..20: mol_type = other RNA
gaaacaaaggaggattcatg

SEQ ID NO: 4040 - RNA, 20 nt, synthetic construct
  source 1..20: mol_type = other RNA
agaaacaaaggaggattcat

SEQ ID NO: 4041 - RNA, 20 nt, synthetic construct
  source 1..20: mol_type = other RNA
aagaaacaaaggaggattca

SEQ ID NO: 4042 - RNA, 20 nt, synthetic construct
  source 1..20: mol_type = other RNA
gaaaagaaaagaaacaaagg

SEQ ID NO: 4043 - RNA, 20 nt, synthetic construct
  source 1..20: mol_type = other RNA
gttgaaaagaaaagaaacaa

SEQ ID NO: 4044 - RNA, 20 nt, synthetic construct
  source 1..20: mol_type = other RNA
tttcttttcttttcaacccc

SEQ ID NO: 4045 - RNA, 20 nt, synthetic construct
  source 1..20: mol_type = other RNA
ttcttttcttttcaacccct

SEQ ID NO: 4046 - RNA, 20 nt, synthetic construct
  source 1..20: mol_type = other RNA
tcgaaggtttaaaggcccag

SEQ ID NO: 4047 - RNA, 20 nt, synthetic construct
  source 1..20: mol_type = other RNA
atcgaaggtttaaaggccca

SEQ ID NO: 4048 - RNA, 20 nt, synthetic construct
  source 1..20: mol_type = other RNA
aatcgaaggtttaaaggccc

SEQ ID NO: 4049 - RNA, 20 nt, synthetic construct
  source 1..20: mol_type = other RNA
gcagttaatcgaaggtttaa

SEQ ID NO: 4050 - RNA, 20 nt, synthetic construct
  source 1..20: mol_type = other RNA
tgcactgggcagttaatcga

SEQ ID NO: 4051 - RNA, 20 nt, synthetic construct
  source 1..20: mol_type = other RNA
accatgacctgggctgcact

SEQ ID NO: 4052 - RNA, 20 nt, synthetic construct
  source 1..20: mol_type = other RNA
taccatgacctgggctgcac

SEQ ID NO: 4053 - RNA, 20 nt, synthetic construct
  source 1..20: mol_type = other RNA
ttaactgcccagtgcagccc

SEQ ID NO: 4054 - RNA, 20 nt, synthetic construct
  source 1..20: mol_type = other RNA
gcccagtgcagcccaggtca

SEQ ID NO: 4055 - RNA, 20 nt, synthetic construct
  source 1..20: mol_type = other RNA
atcatagtgtaccatgacct

SEQ ID NO: 4056 - RNA, 20 nt, synthetic construct
  source 1..20: mol_type = other RNA
gatcatagtgtaccatgacc

SEQ ID NO: 4057 - RNA, 20 nt, synthetic construct
  source 1..20: mol_type = other RNA
tcatggtacactatgatctt

SEQ ID NO: 4058 - RNA, 20 nt, synthetic construct
  source 1..20: mol_type = other RNA
tatgatctttggttcacatg

SEQ ID NO: 4059 - RNA, 20 nt, synthetic construct
  source 1..20: mol_type = other RNA
atgatctttggttcacatga

SEQ ID NO: 4060 - RNA, 20 nt, synthetic construct
  source 1..20: mol_type = other RNA
cacctgaaatgcattagaat

SEQ ID NO: 4061 - RNA, 20 nt, synthetic construct
  source 1..20: mol_type = other RNA
acacctgaaatgcattagaa

SEQ ID NO: 4062 - RNA, 20 nt, synthetic construct
  source 1..20: mol_type = other RNA
tgcccattctaatgcatttc

SEQ ID NO: 4063 - RNA, 20 nt, synthetic construct
  source 1..20: mol_type = other RNA
catctaaaaaaaaaaaaaaa

SEQ ID NO: 4064 - RNA, 20 nt, synthetic construct
  source 1..20: mol_type = other RNA
cttttttttttttttttaga

SEQ ID NO: 4065 - RNA, 20 nt, synthetic construct
  source 1..20: mol_type = other RNA
ggagtctcactctgtcaccc

SEQ ID NO: 4066 - RNA, 20 nt, synthetic construct
  source 1..20: mol_type = other RNA
aaaaatagaaaactcagcct

SEQ ID NO: 4067 - RNA, 20 nt, synthetic construct
  source 1..20: mol_type = other RNA
taaaaatagaaaactcagcc

SEQ ID NO: 4068 - RNA, 20 nt, synthetic construct
  source 1..20: mol_type = other RNA
ttttctatttttagtagaga

SEQ ID NO: 4069 - RNA, 20 nt, synthetic construct
  source 1..20: mol_type = other RNA
tttctatttttagtagagat

SEQ ID NO: 4070 - RNA, 20 nt, synthetic construct
  source 1..20: mol_type = other RNA
ttctatttttagtagagatg

SEQ ID NO: 4071 - RNA, 20 nt, synthetic construct
  source 1..20: mol_type = other RNA
gagatggggttttaccacct

SEQ ID NO: 4072 - RNA, 20 nt, synthetic construct
  source 1..20: mol_type = other RNA
tgagaccagcctggccaagg

SEQ ID NO: 4073 - RNA, 20 nt, synthetic construct
  source 1..20: mol_type = other RNA
ggggttttaccaccttggcc

SEQ ID NO: 4074 - RNA, 20 nt, synthetic construct
  source 1..20: mol_type = other RNA
gtttgagaccagcctggcca

SEQ ID NO: 4075 - RNA, 20 nt, synthetic construct
  source 1..20: mol_type = other RNA
ttttaccaccttggccaggc

SEQ ID NO: 4076 - RNA, 20 nt, synthetic construct
  source 1..20: mol_type = other RNA
tcaggagtttgagaccagcc

SEQ ID NO: 4077 - RNA, 20 nt, synthetic construct
  source 1..20: mol_type = other RNA
ggtctcaaactcctgacctc

SEQ ID NO: 4078 - RNA, 20 nt, synthetic construct
  source 1..20: mol_type = other RNA
cgggtggatcacctgaggtc

SEQ ID NO: 4079 - RNA, 20 nt, synthetic construct
  source 1..20: mol_type = other RNA
cgaggcgggtggatcacctg

SEQ ID NO: 4080 - RNA, 20 nt, synthetic construct
  source 1..20: mol_type = other RNA
ctttgggaggccgaggcggg

SEQ ID NO: 4081 - RNA, 20 nt, synthetic construct
  source 1..20: mol_type = other RNA
ctcaggtgatccacccgcct

SEQ ID NO: 4082 - RNA, 20 nt, synthetic construct
  source 1..20: mol_type = other RNA
gcactttgggaggccgaggc

SEQ ID NO: 4083 - RNA, 20 nt, synthetic construct
  source 1..20: mol_type = other RNA
agcactttgggaggccgagg

SEQ ID NO: 4084 - RNA, 20 nt, synthetic construct
  source 1..20: mol_type = other RNA
tccagcactttgggaggccg

SEQ ID NO: 4085 - RNA, 20 nt, synthetic construct
  source 1..20: mol_type = other RNA
tgtaattccagcactttggg

SEQ ID NO: 4086 - RNA, 20 nt, synthetic construct
  source 1..20: mol_type = other RNA
acctgtaattccagcacttt

SEQ ID NO: 4087 - RNA, 20 nt, synthetic construct
  source 1..20: mol_type = other RNA
gcctcggcctcccaaagtgc

SEQ ID NO: 4088 - RNA, 20 nt, synthetic construct
  source 1..20: mol_type = other RNA
cacctgtaattccagcactt

SEQ ID NO: 4089 - RNA, 20 nt, synthetic construct
  source 1..20: mol_type = other RNA
tcccaaagtgctggaattac

SEQ ID NO: 4090 - RNA, 20 nt, synthetic construct
  source 1..20: mol_type = other RNA
caggtgcgagtcaccacgcc

SEQ ID NO: 4091 - RNA, 20 nt, synthetic construct
  source 1..20: mol_type = other RNA
taagaaactgtggccaggcg

SEQ ID NO: 4092 - RNA, 20 nt, synthetic construct
  source 1..20: mol_type = other RNA
aaaagtaagaaactgtggcc

SEQ ID NO: 4093 - RNA, 20 nt, synthetic construct
  source 1..20: mol_type = other RNA
aatgcaaaagtaagaaactg

SEQ ID NO: 4094 - RNA, 20 nt, synthetic construct
  source 1..20: mol_type = other RNA
gcattctgtactatgttttt

SEQ ID NO: 4095 - RNA, 20 nt, synthetic construct
  source 1..20: mol_type = other RNA
gatcaaatgcatcagaagca

SEQ ID NO: 4096 - RNA, 20 nt, synthetic construct
  source 1..20: mol_type = other RNA
ttgatctttgcttctaatca

SEQ ID NO: 4097 - RNA, 20 nt, synthetic construct
  source 1..20: mol_type = other RNA
atcacggacattgttctcta

SEQ ID NO: 4098 - RNA, 20 nt, synthetic construct
  source 1..20: mol_type = other RNA
cattgttctctatggagtgc

SEQ ID NO: 4099 - RNA, 20 nt, synthetic construct
  source 1..20: mol_type = other RNA
attgttctctatggagtgca

SEQ ID NO: 4100 - RNA, 20 nt, synthetic construct
  source 1..20: mol_type = other RNA
ttgttctctatggagtgcag

SEQ ID NO: 4101 - RNA, 20 nt, synthetic construct
  source 1..20: mol_type = other RNA
ccatcactgggggtgtggac

SEQ ID NO: 4102 - RNA, 20 nt, synthetic construct
  source 1..20: mol_type = other RNA
ggtgtccatcactgggggtg

SEQ ID NO: 4103 - RNA, 20 nt, synthetic construct
  source 1..20: mol_type = other RNA
acctaggtgtccatcactgg

SEQ ID NO: 4104 - RNA, 20 nt, synthetic construct
  source 1..20: mol_type = other RNA
cctgtccacacccccagtga

SEQ ID NO: 4105 - RNA, 20 nt, synthetic construct
  source 1..20: mol_type = other RNA
cacctaggtgtccatcactg

SEQ ID NO: 4106 - RNA, 20 nt, synthetic construct
  source 1..20: mol_type = other RNA
tcacctaggtgtccatcact

SEQ ID NO: 4107 - RNA, 20 nt, synthetic construct
  source 1..20: mol_type = other RNA
gtcacctaggtgtccatcac

SEQ ID NO: 4108 - RNA, 20 nt, synthetic construct
  source 1..20: mol_type = other RNA
acccccagtgatggacacct

SEQ ID NO: 4109 - RNA, 20 nt, synthetic construct
  source 1..20: mol_type = other RNA
cagagagttggaggtcacct

SEQ ID NO: 4110 - RNA, 20 nt, synthetic construct
  source 1..20: mol_type = other RNA
ttgtggtgacagagagttgg

SEQ ID NO: 4111 - RNA, 20 nt, synthetic construct
  source 1..20: mol_type = other RNA
tatttgtggtgacagagagt

SEQ ID NO: 4112 - RNA, 20 nt, synthetic construct
  source 1..20: mol_type = other RNA
ggttactgctgtgttatttg

SEQ ID NO: 4113 - RNA, 20 nt, synthetic construct
  source 1..20: mol_type = other RNA
caggagaacccatctgagga

SEQ ID NO: 4114 - RNA, 20 nt, synthetic construct
  source 1..20: mol_type = other RNA
cagcagtaaccatcctcaga

SEQ ID NO: 4115 - RNA, 20 nt, synthetic construct
  source 1..20: mol_type = other RNA
agcagtaaccatcctcagat

SEQ ID NO: 4116 - RNA, 20 nt, synthetic construct
  source 1..20: mol_type = other RNA
tccccaggagaacccatctg

SEQ ID NO: 4117 - RNA, 20 nt, synthetic construct
  source 1..20: mol_type = other RNA
catcctcagatgggttctcc

SEQ ID NO: 4118 - RNA, 20 nt, synthetic construct
  source 1..20: mol_type = other RNA
atcctcagatgggttctcct

SEQ ID NO: 4119 - RNA, 20 nt, synthetic construct
  source 1..20: mol_type = other RNA
tcctcagatgggttctcctg

SEQ ID NO: 4120 - RNA, 20 nt, synthetic construct
  source 1..20: mol_type = other RNA
aaatgttcccacaactcccc

SEQ ID NO: 4121 - RNA, 20 nt, synthetic construct
  source 1..20: mol_type = other RNA
tgggttctcctggggagttg

SEQ ID NO: 4122 - RNA, 20 nt, synthetic construct
  source 1..20: mol_type = other RNA
gggttctcctggggagttgt

SEQ ID NO: 4123 - RNA, 20 nt, synthetic construct
  source 1..20: mol_type = other RNA
agttgtgggaacatttcttc

SEQ ID NO: 4124 - RNA, 20 nt, synthetic construct
  source 1..20: mol_type = other RNA
cacctggcaattcagctctt

SEQ ID NO: 4125 - RNA, 20 nt, synthetic construct
  source 1..20: mol_type = other RNA
ccacctggcaattcagctct

SEQ ID NO: 4126 - RNA, 20 nt, synthetic construct
  source 1..20: mol_type = other RNA
gacccaagagctgaattgcc

SEQ ID NO: 4127 - RNA, 20 nt, synthetic construct
  source 1..20: mol_type = other RNA
ccaagagctgaattgccagg

SEQ ID NO: 4128 - RNA, 20 nt, synthetic construct
  source 1..20: mol_type = other RNA
gagctgaattgccaggtggt

SEQ ID NO: 4129 - RNA, 20 nt, synthetic construct
  source 1..20: mol_type = other RNA
gatatgtagatcctaccacc

SEQ ID NO: 4130 - RNA, 20 nt, synthetic construct
  source 1..20: mol_type = other RNA
ggcatcatgtagaatatcta

SEQ ID NO: 4131 - RNA, 20 nt, synthetic construct
  source 1..20: mol_type = other RNA
tagatattctacatgatgcc

SEQ ID NO: 4132 - RNA, 20 nt, synthetic construct
  source 1..20: mol_type = other RNA
ggccgctctggagaacgacc

SEQ ID NO: 4133 - RNA, 20 nt, synthetic construct
  source 1..20: mol_type = other RNA
tgccaggtcgttctccagag

SEQ ID NO: 4134 - RNA, 20 nt, synthetic construct
  source 1..20: mol_type = other RNA
gtagatggatggggccgctc

SEQ ID NO: 4135 - RNA, 20 nt, synthetic construct
  source 1..20: mol_type = other RNA
tgtgggaatgtagatggatg

SEQ ID NO: 4136 - RNA, 20 nt, synthetic construct
  source 1..20: mol_type = other RNA
ttgtgggaatgtagatggat

SEQ ID NO: 4137 - RNA, 20 nt, synthetic construct
  source 1..20: mol_type = other RNA
tttgtgggaatgtagatgga

SEQ ID NO: 4138 - RNA, 20 nt, synthetic construct
  source 1..20: mol_type = other RNA
cgggtttgtgggaatgtaga

SEQ ID NO: 4139 - RNA, 20 nt, synthetic construct
  source 1..20: mol_type = other RNA
tgttggttacacgggtttgt

SEQ ID NO: 4140 - RNA, 20 nt, synthetic construct
  source 1..20: mol_type = other RNA
gtgttggttacacgggtttg

SEQ ID NO: 4141 - RNA, 20 nt, synthetic construct
  source 1..20: mol_type = other RNA
atgccaagtgttggttacac

SEQ ID NO: 4142 - RNA, 20 nt, synthetic construct
  source 1..20: mol_type = other RNA
aatgccaagtgttggttaca

SEQ ID NO: 4143 - RNA, 20 nt, synthetic construct
  source 1..20: mol_type = other RNA
aaacccgtgtaaccaacact

SEQ ID NO: 4144 - RNA, 20 nt, synthetic construct
  source 1..20: mol_type = other RNA
atctgggaaatgccaagtgt

SEQ ID NO: 4145 - RNA, 20 nt, synthetic construct
  source 1..20: mol_type = other RNA
ctggcaaaagttagacatct

SEQ ID NO: 4146 - RNA, 20 nt, synthetic construct
  source 1..20: mol_type = other RNA
actggcaaaagttagacatc

SEQ ID NO: 4147 - RNA, 20 nt, synthetic construct
  source 1..20: mol_type = other RNA
gacacttgatactgtacaac

SEQ ID NO: 4148 - RNA, 20 nt, synthetic construct
  source 1..20: mol_type = other RNA
tcactttgctgttttatttt

SEQ ID NO: 4149 - RNA, 20 nt, synthetic construct
  source 1..20: mol_type = other RNA
aaagtgacttagcgagtaag

SEQ ID NO: 4150 - RNA, 20 nt, synthetic construct
  source 1..20: mol_type = other RNA
cttactcgctaagtcacttt

SEQ ID NO: 4151 - RNA, 20 nt, synthetic construct
  source 1..20: mol_type = other RNA
ggcacagtgcttatgtcact

SEQ ID NO: 4152 - RNA, 20 nt, synthetic construct
  source 1..20: mol_type = other RNA
tggcacagtgcttatgtcac

SEQ ID NO: 4153 - RNA, 20 nt, synthetic construct
  source 1..20: mol_type = other RNA
cagaatcgactgcattttgt

SEQ ID NO: 4154 - RNA, 20 nt, synthetic construct
  source 1..20: mol_type = other RNA
gtcgattctgtgactcagag

SEQ ID NO: 4155 - RNA, 20 nt, synthetic construct
  source 1..20: mol_type = other RNA
gcaaagtcacacagcaagtg

SEQ ID NO: 4156 - RNA, 20 nt, synthetic construct
  source 1..20: mol_type = other RNA
tggttaagggtgcaggctct

SEQ ID NO: 4157 - RNA, 20 nt, synthetic construct
  source 1..20: mol_type = other RNA
gtggttaagggtgcaggctc

SEQ ID NO: 4158 - RNA, 20 nt, synthetic construct
  source 1..20: mol_type = other RNA
agcatagtggttaagggtgc

SEQ ID NO: 4159 - RNA, 20 nt, synthetic construct
  source 1..20: mol_type = other RNA
aataatagcatagtggttaa

SEQ ID NO: 4160 - RNA, 20 nt, synthetic construct
  source 1..20: mol_type = other RNA
taataatagcatagtggtta

SEQ ID NO: 4161 - RNA, 20 nt, synthetic construct
  source 1..20: mol_type = other RNA
aaaacataataatagcatag

SEQ ID NO: 4162 - RNA, 20 nt, synthetic construct
  source 1..20: mol_type = other RNA
gtagacccagatgatatttt

SEQ ID NO: 4163 - RNA, 20 nt, synthetic construct
  source 1..20: mol_type = other RNA
ctctctcctaaaatatcatc

SEQ ID NO: 4164 - RNA, 20 nt, synthetic construct
  source 1..20: mol_type = other RNA
tctctcctaaaatatcatct

SEQ ID NO: 4165 - RNA, 20 nt, synthetic construct
  source 1..20: mol_type = other RNA
gtctacattgcaagcctctt

SEQ ID NO: 4166 - RNA, 20 nt, synthetic construct
  source 1..20: mol_type = other RNA
ccacacagtccctgccaaag

SEQ ID NO: 4167 - RNA, 20 nt, synthetic construct
  source 1..20: mol_type = other RNA
acattgcaagcctctttggc

SEQ ID NO: 4168 - RNA, 20 nt, synthetic construct
  source 1..20: mol_type = other RNA
cattgcaagcctctttggca

SEQ ID NO: 4169 - RNA, 20 nt, synthetic construct
  source 1..20: mol_type = other RNA
cctctttggcagggactgtg

SEQ ID NO: 4170 - RNA, 20 nt, synthetic construct
  source 1..20: mol_type = other RNA
gactgtgtggtaaacctctt

SEQ ID NO: 4171 - RNA, 20 nt, synthetic construct
  source 1..20: mol_type = other RNA
actgtgtggtaaacctcttt

SEQ ID NO: 4172 - RNA, 20 nt, synthetic construct
  source 1..20: mol_type = other RNA
ctgtgtggtaaacctctttg

SEQ ID NO: 4173 - RNA, 20 nt, synthetic construct
  source 1..20: mol_type = other RNA
gttccttactggccccaaag

SEQ ID NO: 4174 - RNA, 20 nt, synthetic construct
  source 1..20: mol_type = other RNA
aaacctctttggggccagta

SEQ ID NO: 4175 - RNA, 20 nt, synthetic construct
  source 1..20: mol_type = other RNA
cactgagctcagttccttac

SEQ ID NO: 4176 - RNA, 20 nt, synthetic construct
  source 1..20: mol_type = other RNA
tgagctcagtgactttctta

SEQ ID NO: 4177 - RNA, 20 nt, synthetic construct
  source 1..20: mol_type = other RNA
gagctcagtgactttcttac

SEQ ID NO: 4178 - RNA, 20 nt, synthetic construct
  source 1..20: mol_type = other RNA
agctcagtgactttcttacg

SEQ ID NO: 4179 - RNA, 20 nt, synthetic construct
  source 1..20: mol_type = other RNA
tcattgttttacagctttag

SEQ ID NO: 4180 - RNA, 20 nt, synthetic construct
  source 1..20: mol_type = other RNA
cattgttttacagctttaga

SEQ ID NO: 4181 - RNA, 20 nt, synthetic construct
  source 1..20: mol_type = other RNA
attgttttacagctttagag

SEQ ID NO: 4182 - RNA, 20 nt, synthetic construct
  source 1..20: mol_type = other RNA
gatgtttcttagagtttatc

SEQ ID NO: 4183 - RNA, 20 nt, synthetic construct
  source 1..20: mol_type = other RNA
gtttcttagagtttatctgg

SEQ ID NO: 4184 - RNA, 20 nt, synthetic construct
  source 1..20: mol_type = other RNA
gagtttatctggaggactac

SEQ ID NO: 4185 - RNA, 20 nt, synthetic construct
  source 1..20: mol_type = other RNA
agtttatctggaggactaca

SEQ ID NO: 4186 - RNA, 20 nt, synthetic construct
  source 1..20: mol_type = other RNA
acagggtgcatgagcaaaag

SEQ ID NO: 4187 - RNA, 20 nt, synthetic construct
  source 1..20: mol_type = other RNA
cccaaacagcttctttgtgg

SEQ ID NO: 4188 - RNA, 20 nt, synthetic construct
  source 1..20: mol_type = other RNA
ccccaaacagcttctttgtg

SEQ ID NO: 4189 - RNA, 20 nt, synthetic construct
  source 1..20: mol_type = other RNA
accccaaacagcttctttgt

SEQ ID NO: 4190 - RNA, 20 nt, synthetic construct
  source 1..20: mol_type = other RNA
gaccccaaacagcttctttg

SEQ ID NO: 4191 - RNA, 20 nt, synthetic construct
  source 1..20: mol_type = other RNA
acccccacaaagaagctgtt

SEQ ID NO: 4192 - RNA, 20 nt, synthetic construct
  source 1..20: mol_type = other RNA
cccccacaaagaagctgttt

SEQ ID NO: 4193 - RNA, 20 nt, synthetic construct
  source 1..20: mol_type = other RNA
ccccacaaagaagctgtttg

SEQ ID NO: 4194 - RNA, 20 nt, synthetic construct
  source 1..20: mol_type = other RNA
caaagaagctgtttggggtc

SEQ ID NO: 4195 - RNA, 20 nt, synthetic construct
  source 1..20: mol_type = other RNA
agctgtttggggtctggtca

SEQ ID NO: 4196 - RNA, 20 nt, synthetic construct
  source 1..20: mol_type = other RNA
ggggtctggtcatggtagat

SEQ ID NO: 4197 - RNA, 20 nt, synthetic construct
  source 1..20: mol_type = other RNA
catggtagataggcattcct

SEQ ID NO: 4198 - RNA, 20 nt, synthetic construct
  source 1..20: mol_type = other RNA
tgttgggaagccaggggcct

SEQ ID NO: 4199 - RNA, 20 nt, synthetic construct
  source 1..20: mol_type = other RNA
gataggcattcctaggcccc

SEQ ID NO: 4200 - RNA, 20 nt, synthetic construct
  source 1..20: mol_type = other RNA
aaatggtgttgggaagccag

SEQ ID NO: 4201 - RNA, 20 nt, synthetic construct
  source 1..20: mol_type = other RNA
caaatggtgttgggaagcca

SEQ ID NO: 4202 - RNA, 20 nt, synthetic construct
  source 1..20: mol_type = other RNA
ccaaatggtgttgggaagcc

SEQ ID NO: 4203 - RNA, 20 nt, synthetic construct
  source 1..20: mol_type = other RNA
tccgggggccaaatggtgtt

SEQ ID NO: 4204 - RNA, 20 nt, synthetic construct
  source 1..20: mol_type = other RNA
ttccgggggccaaatggtgt

SEQ ID NO: 4205 - RNA, 20 nt, synthetic construct
  source 1..20: mol_type = other RNA
cctggcttcccaacaccatt

SEQ ID NO: 4206 - RNA, 20 nt, synthetic construct
  source 1..20: mol_type = other RNA
agctgcttccgggggccaaa

SEQ ID NO: 4207 - RNA, 20 nt, synthetic construct
  source 1..20: mol_type = other RNA
tcccaacaccatttggcccc

SEQ ID NO: 4208 - RNA, 20 nt, synthetic construct
  source 1..20: mol_type = other RNA
tcatgacaagctgcttccgg

SEQ ID NO: 4209 - RNA, 20 nt, synthetic construct
  source 1..20: mol_type = other RNA
ctcatgacaagctgcttccg

SEQ ID NO: 4210 - RNA, 20 nt, synthetic construct
  source 1..20: mol_type = other RNA
cctcatgacaagctgcttcc

SEQ ID NO: 4211 - RNA, 20 nt, synthetic construct
  source 1..20: mol_type = other RNA
acctcatgacaagctgcttc

SEQ ID NO: 4212 - RNA, 20 nt, synthetic construct
  source 1..20: mol_type = other RNA
cccggaagcagcttgtcatg

SEQ ID NO: 4213 - RNA, 20 nt, synthetic construct
  source 1..20: mol_type = other RNA
gaagcagcttgtcatgaggt

SEQ ID NO: 4214 - RNA, 20 nt, synthetic construct
  source 1..20: mol_type = other RNA
aagcagcttgtcatgaggtt

SEQ ID NO: 4215 - RNA, 20 nt, synthetic construct
  source 1..20: mol_type = other RNA
agcagcttgtcatgaggttg

SEQ ID NO: 4216 - RNA, 20 nt, synthetic construct
  source 1..20: mol_type = other RNA
ttgtcatgaggttggggagc

SEQ ID NO: 4217 - RNA, 20 nt, synthetic construct
  source 1..20: mol_type = other RNA
catgaggttggggagcaggt

SEQ ID NO: 4218 - RNA, 20 nt, synthetic construct
  source 1..20: mol_type = other RNA
gttggggagcaggttggtgt

SEQ ID NO: 4219 - RNA, 20 nt, synthetic construct
  source 1..20: mol_type = other RNA
ttggggagcaggttggtgtt

SEQ ID NO: 4220 - RNA, 20 nt, synthetic construct
  source 1..20: mol_type = other RNA
tggggagcaggttggtgttg

SEQ ID NO: 4221 - RNA, 20 nt, synthetic construct
  source 1..20: mol_type = other RNA
ggggagcaggttggtgttgg

SEQ ID NO: 4222 - RNA, 20 nt, synthetic construct
  source 1..20: mol_type = other RNA
gggagcaggttggtgttggg

SEQ ID NO: 4223 - RNA, 20 nt, synthetic construct
  source 1..20: mol_type = other RNA
ggagcaggttggtgttgggg

SEQ ID NO: 4224 - RNA, 20 nt, synthetic construct
  source 1..20: mol_type = other RNA
gagcaggttggtgttggggg

SEQ ID NO: 4225 - RNA, 20 nt, synthetic construct
  source 1..20: mol_type = other RNA
gttggtgttggggggggcct

SEQ ID NO: 4226 - RNA, 20 nt, synthetic construct
  source 1..20: mol_type = other RNA
ttggtgttggggggggcctt

SEQ ID NO: 4227 - RNA, 20 nt, synthetic construct
  source 1..20: mol_type = other RNA
tggtgttggggggggccttg

SEQ ID NO: 4228 - RNA, 20 nt, synthetic construct
  source 1..20: mol_type = other RNA
ggtgttggggggggccttgg

SEQ ID NO: 4229 - RNA, 20 nt, synthetic construct
  source 1..20: mol_type = other RNA
tctccttttcctttccccca

SEQ ID NO: 4230 - RNA, 20 nt, synthetic construct
  source 1..20: mol_type = other RNA
tggggggggccttgggggaa

SEQ ID NO: 4231 - RNA, 20 nt, synthetic construct
  source 1..20: mol_type = other RNA
gggccttgggggaaaggaaa

SEQ ID NO: 4232 - RNA, 20 nt, synthetic construct
  source 1..20: mol_type = other RNA
aggaaaaggagaagactgcc

SEQ ID NO: 4233 - RNA, 20 nt, synthetic construct
  source 1..20: mol_type = other RNA
gattctgattcctcgttgcc

SEQ ID NO: 4234 - RNA, 20 nt, synthetic construct
  source 1..20: mol_type = other RNA
gagaagactgccaggcaacg

SEQ ID NO: 4235 - RNA, 20 nt, synthetic construct
  source 1..20: mol_type = other RNA
tctcaaaaagactcaattga

SEQ ID NO: 4236 - RNA, 20 nt, synthetic construct
  source 1..20: mol_type = other RNA
ctcaaaaagactcaattgaa

SEQ ID NO: 4237 - RNA, 20 nt, synthetic construct
  source 1..20: mol_type = other RNA
tcaaaaagactcaattgaag

SEQ ID NO: 4238 - RNA, 20 nt, synthetic construct
  source 1..20: mol_type = other RNA
gcctccgtttcaacgagtgt

SEQ ID NO: 4239 - RNA, 20 nt, synthetic construct
  source 1..20: mol_type = other RNA
ggctccaacactcgttgaaa

SEQ ID NO: 4240 - RNA, 20 nt, synthetic construct
  source 1..20: mol_type = other RNA
tccaacactcgttgaaacgg

SEQ ID NO: 4241 - RNA, 20 nt, synthetic construct
  source 1..20: mol_type = other RNA
tcgttgaaacggaggctcag

SEQ ID NO: 4242 - RNA, 20 nt, synthetic construct
  source 1..20: mol_type = other RNA
cgttgaaacggaggctcaga

SEQ ID NO: 4243 - RNA, 20 nt, synthetic construct
  source 1..20: mol_type = other RNA
aacggaggctcagagggcta

SEQ ID NO: 4244 - RNA, 20 nt, synthetic construct
  source 1..20: mol_type = other RNA
agggctaaggtaatgtactc

SEQ ID NO: 4245 - RNA, 20 nt, synthetic construct
  source 1..20: mol_type = other RNA
ggtaatgtactcaggatcaa

SEQ ID NO: 4246 - RNA, 20 nt, synthetic construct
  source 1..20: mol_type = other RNA
gaactgtgtgcctagagaca

SEQ ID NO: 4247 - RNA, 20 nt, synthetic construct
  source 1..20: mol_type = other RNA
gaaactcaaaccatgtctct

SEQ ID NO: 4248 - RNA, 20 nt, synthetic construct
  source 1..20: mol_type = other RNA
tctctaggcacacagttcag

SEQ ID NO: 4249 - RNA, 20 nt, synthetic construct
  source 1..20: mol_type = other RNA
ttctcctcctgaggaataat

SEQ ID NO: 4250 - RNA, 20 nt, synthetic construct
  source 1..20: mol_type = other RNA
cttctcctcctgaggaataa

SEQ ID NO: 4251 - RNA, 20 nt, synthetic construct
  source 1..20: mol_type = other RNA
aggtcttcccattattcctc

SEQ ID NO: 4252 - RNA, 20 nt, synthetic construct
  source 1..20: mol_type = other RNA
tcttcccattattcctcagg

SEQ ID NO: 4253 - RNA, 20 nt, synthetic construct
  source 1..20: mol_type = other RNA
accatgaacttctcctcctg

SEQ ID NO: 4254 - RNA, 20 nt, synthetic construct
  source 1..20: mol_type = other RNA
tcctcaggaggagaagttca

SEQ ID NO: 4255 - RNA, 20 nt, synthetic construct
  source 1..20: mol_type = other RNA
agaagttcatggtcaagagt

SEQ ID NO: 4256 - RNA, 20 nt, synthetic construct
  source 1..20: mol_type = other RNA
gaagttcatggtcaagagta

SEQ ID NO: 4257 - RNA, 20 nt, synthetic construct
  source 1..20: mol_type = other RNA
aaaaaaaaaaaagcttgaga

SEQ ID NO: 4258 - RNA, 20 nt, synthetic construct
  source 1..20: mol_type = other RNA
agagtcttgctctgtcaccg

SEQ ID NO: 4259 - RNA, 20 nt, synthetic construct
  source 1..20: mol_type = other RNA
tcttgctctgtcaccgaggc

SEQ ID NO: 4260 - RNA, 20 nt, synthetic construct
  source 1..20: mol_type = other RNA
acgccactgcactccagcct

SEQ ID NO: 4261 - RNA, 20 nt, synthetic construct
  source 1..20: mol_type = other RNA
tcaccgaggctggagtgcag

SEQ ID NO: 4262 - RNA, 20 nt, synthetic construct
  source 1..20: mol_type = other RNA
ggagtgcagtggcgtgatct

SEQ ID NO: 4263 - RNA, 20 nt, synthetic construct
  source 1..20: mol_type = other RNA
tgcttgaacctgggaggcgg

SEQ ID NO: 4264 - RNA, 20 nt, synthetic construct
  source 1..20: mol_type = other RNA
cactgcaacctccgcctccc

SEQ ID NO: 4265 - RNA, 20 nt, synthetic construct
  source 1..20: mol_type = other RNA
aattgcttgaacctgggagg

SEQ ID NO: 4266 - RNA, 20 nt, synthetic construct
  source 1..20: mol_type = other RNA
gaaaattgcttgaacctggg

SEQ ID NO: 4267 - RNA, 20 nt, synthetic construct
  source 1..20: mol_type = other RNA
caggaaaattgcttgaacct

SEQ ID NO: 4268 - RNA, 20 nt, synthetic construct
  source 1..20: mol_type = other RNA
gcaggaaaattgcttgaacc

SEQ ID NO: 4269 - RNA, 20 nt, synthetic construct
  source 1..20: mol_type = other RNA
gctacttgggaggctgaggc

SEQ ID NO: 4270 - RNA, 20 nt, synthetic construct
  source 1..20: mol_type = other RNA
cccagctacttgggaggctg

SEQ ID NO: 4271 - RNA, 20 nt, synthetic construct
  source 1..20: mol_type = other RNA
tataatcccagctacttggg

SEQ ID NO: 4272 - RNA, 20 nt, synthetic construct
  source 1..20: mol_type = other RNA
gcctataatcccagctactt

SEQ ID NO: 4273 - RNA, 20 nt, synthetic construct
  source 1..20: mol_type = other RNA
gcctcagcctcccaagtagc

SEQ ID NO: 4274 - RNA, 20 nt, synthetic construct
  source 1..20: mol_type = other RNA
tgcctataatcccagctact

SEQ ID NO: 4275 - RNA, 20 nt, synthetic construct
  source 1..20: mol_type = other RNA
cctcagcctcccaagtagct

SEQ ID NO: 4276 - RNA, 20 nt, synthetic construct
  source 1..20: mol_type = other RNA
tcccaagtagctgggattat

SEQ ID NO: 4277 - RNA, 20 nt, synthetic construct
  source 1..20: mol_type = other RNA
aatgagctgggcgtggtggt

SEQ ID NO: 4278 - RNA, 20 nt, synthetic construct
  source 1..20: mol_type = other RNA
aaatgagctgggcgtggtgg

SEQ ID NO: 4279 - RNA, 20 nt, synthetic construct
  source 1..20: mol_type = other RNA
caaaaatgagctgggcgtgg

SEQ ID NO: 4280 - RNA, 20 nt, synthetic construct
  source 1..20: mol_type = other RNA
atacaaaaatgagctgggcg

SEQ ID NO: 4281 - RNA, 20 nt, synthetic construct
  source 1..20: mol_type = other RNA
caaaaatacaaaaatgagct

SEQ ID NO: 4282 - RNA, 20 nt, synthetic construct
  source 1..20: mol_type = other RNA
gcaaaaatacaaaaatgagc

SEQ ID NO: 4283 - RNA, 20 nt, synthetic construct
  source 1..20: mol_type = other RNA
tttttgtatttttgcagaga

SEQ ID NO: 4284 - RNA, 20 nt, synthetic construct
  source 1..20: mol_type = other RNA
ttttgtatttttgcagagac

SEQ ID NO: 4285 - RNA, 20 nt, synthetic construct
  source 1..20: mol_type = other RNA
tttgtatttttgcagagacg

SEQ ID NO: 4286 - RNA, 20 nt, synthetic construct
  source 1..20: mol_type = other RNA
gagacggggtttcaccatgc

SEQ ID NO: 4287 - RNA, 20 nt, synthetic construct
  source 1..20: mol_type = other RNA
caagaccagcctgaccagca

SEQ ID NO: 4288 - RNA, 20 nt, synthetic construct
  source 1..20: mol_type = other RNA
ggggtttcaccatgctggtc

SEQ ID NO: 4289 - RNA, 20 nt, synthetic construct
  source 1..20: mol_type = other RNA
tttcaccatgctggtcaggc

SEQ ID NO: 4290 - RNA, 20 nt, synthetic construct
  source 1..20: mol_type = other RNA
ctggcggattacttgaggtc

SEQ ID NO: 4291 - RNA, 20 nt, synthetic construct
  source 1..20: mol_type = other RNA
cgaggctggcggattacttg

SEQ ID NO: 4292 - RNA, 20 nt, synthetic construct
  source 1..20: mol_type = other RNA
ctttgagaggccgaggctgg

SEQ ID NO: 4293 - RNA, 20 nt, synthetic construct
  source 1..20: mol_type = other RNA
ctcaagtaatccgccagcct

SEQ ID NO: 4294 - RNA, 20 nt, synthetic construct
  source 1..20: mol_type = other RNA
gcactttgagaggccgaggc

SEQ ID NO: 4295 - RNA, 20 nt, synthetic construct
  source 1..20: mol_type = other RNA
cctagcactttgagaggccg

SEQ ID NO: 4296 - RNA, 20 nt, synthetic construct
  source 1..20: mol_type = other RNA
tataatcctagcactttgag

SEQ ID NO: 4297 - RNA, 20 nt, synthetic construct
  source 1..20: mol_type = other RNA
cctcggcctctcaaagtgct

SEQ ID NO: 4298 - RNA, 20 nt, synthetic construct
  source 1..20: mol_type = other RNA
tctcaaagtgctaggattat

SEQ ID NO: 4299 - RNA, 20 nt, synthetic construct
  source 1..20: mol_type = other RNA
gagaaggaggccaggggtgg

SEQ ID NO: 4300 - RNA, 20 nt, synthetic construct
  source 1..20: mol_type = other RNA
taggcgtgagccaccacccc

SEQ ID NO: 4301 - RNA, 20 nt, synthetic construct
  source 1..20: mol_type = other RNA
catgagaaggaggccagggg

SEQ ID NO: 4302 - RNA, 20 nt, synthetic construct
  source 1..20: mol_type = other RNA
gagcatgagaaggaggccag

SEQ ID NO: 4303 - RNA, 20 nt, synthetic construct
  source 1..20: mol_type = other RNA
agagcatgagaaggaggcca

SEQ ID NO: 4304 - RNA, 20 nt, synthetic construct
  source 1..20: mol_type = other RNA
aagagcatgagaaggaggcc

SEQ ID NO: 4305 - RNA, 20 nt, synthetic construct
  source 1..20: mol_type = other RNA
gattaaagagcatgagaagg

SEQ ID NO: 4306 - RNA, 20 nt, synthetic construct
  source 1..20: mol_type = other RNA
tgtgattaaagagcatgaga

SEQ ID NO: 4307 - RNA, 20 nt, synthetic construct
  source 1..20: mol_type = other RNA
atcacagttcagagcagtgc

SEQ ID NO: 4308 - RNA, 20 nt, synthetic construct
  source 1..20: mol_type = other RNA
acagttcagagcagtgctgg

SEQ ID NO: 4309 - RNA, 20 nt, synthetic construct
  source 1..20: mol_type = other RNA
gagcagtgctggaggctttt

SEQ ID NO: 4310 - RNA, 20 nt, synthetic construct
  source 1..20: mol_type = other RNA
agcagtgctggaggctttta

SEQ ID NO: 4311 - RNA, 20 nt, synthetic construct
  source 1..20: mol_type = other RNA
gcagtgctggaggcttttag

SEQ ID NO: 4312 - RNA, 20 nt, synthetic construct
  source 1..20: mol_type = other RNA
aggcactgaaagggagaaga

SEQ ID NO: 4313 - RNA, 20 nt, synthetic construct
  source 1..20: mol_type = other RNA
ggtctaaggaggcactgaaa

SEQ ID NO: 4314 - RNA, 20 nt, synthetic construct
  source 1..20: mol_type = other RNA
gggtctaaggaggcactgaa

SEQ ID NO: 4315 - RNA, 20 nt, synthetic construct
  source 1..20: mol_type = other RNA
ctatctttgagggtctaagg

SEQ ID NO: 4316 - RNA, 20 nt, synthetic construct
  source 1..20: mol_type = other RNA
agtctatctttgagggtcta

SEQ ID NO: 4317 - RNA, 20 nt, synthetic construct
  source 1..20: mol_type = other RNA
ggcggggagtctatctttga

SEQ ID NO: 4318 - RNA, 20 nt, synthetic construct
  source 1..20: mol_type = other RNA
aggcggggagtctatctttg

SEQ ID NO: 4319 - RNA, 20 nt, synthetic construct
  source 1..20: mol_type = other RNA
aaagatagactccccgcctc

SEQ ID NO: 4320 - RNA, 20 nt, synthetic construct
  source 1..20: mol_type = other RNA
atgttttcttcccagaggcg

SEQ ID NO: 4321 - RNA, 20 nt, synthetic construct
  source 1..20: mol_type = other RNA
aagatagactccccgcctct

SEQ ID NO: 4322 - RNA, 20 nt, synthetic construct
  source 1..20: mol_type = other RNA
gatgttttcttcccagaggc

SEQ ID NO: 4323 - RNA, 20 nt, synthetic construct
  source 1..20: mol_type = other RNA
agatgttttcttcccagagg

SEQ ID NO: 4324 - RNA, 20 nt, synthetic construct
  source 1..20: mol_type = other RNA
attagatgttttcttcccag

SEQ ID NO: 4325 - RNA, 20 nt, synthetic construct
  source 1..20: mol_type = other RNA
gaagaaaacatctaatgaac

SEQ ID NO: 4326 - RNA, 20 nt, synthetic construct
  source 1..20: mol_type = other RNA
tatagccattttacagacgc

SEQ ID NO: 4327 - RNA, 20 nt, synthetic construct
  source 1..20: mol_type = other RNA
cagcgcctgcgtctgtaaaa

SEQ ID NO: 4328 - RNA, 20 nt, synthetic construct
  source 1..20: mol_type = other RNA
caactgttaacggcaactct

SEQ ID NO: 4329 - RNA, 20 nt, synthetic construct
  source 1..20: mol_type = other RNA
tcaactgttaacggcaactc

SEQ ID NO: 4330 - RNA, 20 nt, synthetic construct
  source 1..20: mol_type = other RNA
tattctgtttcaactgttaa

SEQ ID NO: 4331 - RNA, 20 nt, synthetic construct
  source 1..20: mol_type = other RNA
gaaacagaatagtaaatgca

SEQ ID NO: 4332 - RNA, 20 nt, synthetic construct
  source 1..20: mol_type = other RNA
gggagatttctctgtgtctg

SEQ ID NO: 4333 - RNA, 20 nt, synthetic construct
  source 1..20: mol_type = other RNA
ggggagatttctctgtgtct

SEQ ID NO: 4334 - RNA, 20 nt, synthetic construct
  source 1..20: mol_type = other RNA
aggggagatttctctgtgtc

SEQ ID NO: 4335 - RNA, 20 nt, synthetic construct
  source 1..20: mol_type = other RNA
agacacagagaaatctcccc

SEQ ID NO: 4336 - RNA, 20 nt, synthetic construct
  source 1..20: mol_type = other RNA
acctctgtgagagtgaccag

SEQ ID NO: 4337 - RNA, 20 nt, synthetic construct
  source 1..20: mol_type = other RNA
tacctctgtgagagtgacca

SEQ ID NO: 4338 - RNA, 20 nt, synthetic construct
  source 1..20: mol_type = other RNA
ttacctctgtgagagtgacc

SEQ ID NO: 4339 - RNA, 20 nt, synthetic construct
  source 1..20: mol_type = other RNA
tcccctggtcactctcacag

SEQ ID NO: 4340 - RNA, 20 nt, synthetic construct
  source 1..20: mol_type = other RNA
aagcacattaataataaaaa

SEQ ID NO: 4341 - RNA, 20 nt, synthetic construct
  source 1..20: mol_type = other RNA
aaggcagcacaacttctgca

SEQ ID NO: 4342 - RNA, 20 nt, synthetic construct
  source 1..20: mol_type = other RNA
gctcaatgaacagtagctta

SEQ ID NO: 4343 - RNA, 20 nt, synthetic construct
  source 1..20: mol_type = other RNA
actgttcattgagcacttac

SEQ ID NO: 4344 - RNA, 20 nt, synthetic construct
  source 1..20: mol_type = other RNA
ggagcccttagaaaggggac

SEQ ID NO: 4345 - RNA, 20 nt, synthetic construct
  source 1..20: mol_type = other RNA
tgcatggagcccttagaaag

SEQ ID NO: 4346 - RNA, 20 nt, synthetic construct
  source 1..20: mol_type = other RNA
ggtcgccagtcccctttcta

SEQ ID NO: 4347 - RNA, 20 nt, synthetic construct
  source 1..20: mol_type = other RNA
ttgcatggagcccttagaaa

SEQ ID NO: 4348 - RNA, 20 nt, synthetic construct
  source 1..20: mol_type = other RNA
gtcgccagtcccctttctaa

SEQ ID NO: 4349 - RNA, 20 nt, synthetic construct
  source 1..20: mol_type = other RNA
gttgcatggagcccttagaa

SEQ ID NO: 4350 - RNA, 20 nt, synthetic construct
  source 1..20: mol_type = other RNA
attaggggagttaagttgca

SEQ ID NO: 4351 - RNA, 20 nt, synthetic construct
  source 1..20: mol_type = other RNA
ttggcaactcataggattag

SEQ ID NO: 4352 - RNA, 20 nt, synthetic construct
  source 1..20: mol_type = other RNA
attggcaactcataggatta

SEQ ID NO: 4353 - RNA, 20 nt, synthetic construct
  source 1..20: mol_type = other RNA
aattggcaactcataggatt

SEQ ID NO: 4354 - RNA, 20 nt, synthetic construct
  source 1..20: mol_type = other RNA
gataataattggcaactcat

SEQ ID NO: 4355 - RNA, 20 nt, synthetic construct
  source 1..20: mol_type = other RNA
gtaaagtgggggataataat

SEQ ID NO: 4356 - RNA, 20 nt, synthetic construct
  source 1..20: mol_type = other RNA
tttccttatctgtaaagtgg

SEQ ID NO: 4357 - RNA, 20 nt, synthetic construct
  source 1..20: mol_type = other RNA
gtttccttatctgtaaagtg

SEQ ID NO: 4358 - RNA, 20 nt, synthetic construct
  source 1..20: mol_type = other RNA
agtttccttatctgtaaagt

SEQ ID NO: 4359 - RNA, 20 nt, synthetic construct
  source 1..20: mol_type = other RNA
cagtttccttatctgtaaag

SEQ ID NO: 4360 - RNA, 20 nt, synthetic construct
  source 1..20: mol_type = other RNA
tatcccccactttacagata

SEQ ID NO: 4361 - RNA, 20 nt, synthetic construct
  source 1..20: mol_type = other RNA
ctttacagataaggaaactg

SEQ ID NO: 4362 - RNA, 20 nt, synthetic construct
  source 1..20: mol_type = other RNA
aaggaaactgaggctccaag

SEQ ID NO: 4363 - RNA, 20 nt, synthetic construct
  source 1..20: mol_type = other RNA
agttcattttttaaaccact

SEQ ID NO: 4364 - RNA, 20 nt, synthetic construct
  source 1..20: mol_type = other RNA
ctaccaacgcactacaatct

SEQ ID NO: 4365 - RNA, 20 nt, synthetic construct
  source 1..20: mol_type = other RNA
cctaccaacgcactacaatc

SEQ ID NO: 4366 - RNA, 20 nt, synthetic construct
  source 1..20: mol_type = other RNA
ttacccagattgtagtgcgt

SEQ ID NO: 4367 - RNA, 20 nt, synthetic construct
  source 1..20: mol_type = other RNA
ccagattgtagtgcgttggt

SEQ ID NO: 4368 - RNA, 20 nt, synthetic construct
  source 1..20: mol_type = other RNA
attgtagtgcgttggtaggt

SEQ ID NO: 4369 - RNA, 20 nt, synthetic construct
  source 1..20: mol_type = other RNA
ttgtagtgcgttggtaggta

SEQ ID NO: 4370 - RNA, 20 nt, synthetic construct
  source 1..20: mol_type = other RNA
ggtagggataacctgaaagt

SEQ ID NO: 4371 - RNA, 20 nt, synthetic construct
  source 1..20: mol_type = other RNA
ggtgaaatttcccaactttc

SEQ ID NO: 4372 - RNA, 20 nt, synthetic construct
  source 1..20: mol_type = other RNA
gtagggataacctgaaagtt

SEQ ID NO: 4373 - RNA, 20 nt, synthetic construct
  source 1..20: mol_type = other RNA
agctcagatggtgagctttg

SEQ ID NO: 4374 - RNA, 20 nt, synthetic construct
  source 1..20: mol_type = other RNA
gagctcagatggtgagcttt

SEQ ID NO: 4375 - RNA, 20 nt, synthetic construct
  source 1..20: mol_type = other RNA
ggagctcagatggtgagctt

SEQ ID NO: 4376 - RNA, 20 nt, synthetic construct
  source 1..20: mol_type = other RNA
ggagatgaatggagctcaga

SEQ ID NO: 4377 - RNA, 20 nt, synthetic construct
  source 1..20: mol_type = other RNA
ctcagctggtgggagatgaa

SEQ ID NO: 4378 - RNA, 20 nt, synthetic construct
  source 1..20: mol_type = other RNA
aacgttccatctcagctggt

SEQ ID NO: 4379 - RNA, 20 nt, synthetic construct
  source 1..20: mol_type = other RNA
taacgttccatctcagctgg

SEQ ID NO: 4380 - RNA, 20 nt, synthetic construct
  source 1..20: mol_type = other RNA
gcataacgttccatctcagc

SEQ ID NO: 4381 - RNA, 20 nt, synthetic construct
  source 1..20: mol_type = other RNA
tcatctcccaccagctgaga

SEQ ID NO: 4382 - RNA, 20 nt, synthetic construct
  source 1..20: mol_type = other RNA
tcagtgcatgcatctcttct

SEQ ID NO: 4383 - RNA, 20 nt, synthetic construct
  source 1..20: mol_type = other RNA
atcagtgcatgcatctcttc

SEQ ID NO: 4384 - RNA, 20 nt, synthetic construct
  source 1..20: mol_type = other RNA
aagtctgagttagaacattg

SEQ ID NO: 4385 - RNA, 20 nt, synthetic construct
  source 1..20: mol_type = other RNA
tctctcccccgagggaaatc

SEQ ID NO: 4386 - RNA, 20 nt, synthetic construct
  source 1..20: mol_type = other RNA
tggcgacacctgatttccct

SEQ ID NO: 4387 - RNA, 20 nt, synthetic construct
  source 1..20: mol_type = other RNA
ggcgacacctgatttccctc

SEQ ID NO: 4388 - RNA, 20 nt, synthetic construct
  source 1..20: mol_type = other RNA
gcgacacctgatttccctcg

SEQ ID NO: 4389 - RNA, 20 nt, synthetic construct
  source 1..20: mol_type = other RNA
cgacacctgatttccctcgg

SEQ ID NO: 4390 - RNA, 20 nt, synthetic construct
  source 1..20: mol_type = other RNA
ttcacctctctctcccccga

SEQ ID NO: 4391 - RNA, 20 nt, synthetic construct
  source 1..20: mol_type = other RNA
attcacctctctctcccccg

SEQ ID NO: 4392 - RNA, 20 nt, synthetic construct
  source 1..20: mol_type = other RNA
atttccctcgggggagagag

SEQ ID NO: 4393 - RNA, 20 nt, synthetic construct
  source 1..20: mol_type = other RNA
gctaagtgtagacactaaac

SEQ ID NO: 4394 - RNA, 20 nt, synthetic construct
  source 1..20: mol_type = other RNA
cactgcatgcaggatttgaa

SEQ ID NO: 4395 - RNA, 20 nt, synthetic construct
  source 1..20: mol_type = other RNA
ccccacttcacactgcatgc

SEQ ID NO: 4396 - RNA, 20 nt, synthetic construct
  source 1..20: mol_type = other RNA
atcctgcatgcagtgtgaag

SEQ ID NO: 4397 - RNA, 20 nt, synthetic construct
  source 1..20: mol_type = other RNA
tcctgcatgcagtgtgaagt

SEQ ID NO: 4398 - RNA, 20 nt, synthetic construct
  source 1..20: mol_type = other RNA
cctgcatgcagtgtgaagtg

SEQ ID NO: 4399 - RNA, 20 nt, synthetic construct
  source 1..20: mol_type = other RNA
gatgaaaataaaccccaaaa

SEQ ID NO: 4400 - RNA, 20 nt, synthetic construct
  source 1..20: mol_type = other RNA
gccatcaaaagtcctttttg

SEQ ID NO: 4401 - RNA, 20 nt, synthetic construct
  source 1..20: mol_type = other RNA
tgccatcaaaagtccttttt

SEQ ID NO: 4402 - RNA, 20 nt, synthetic construct
  source 1..20: mol_type = other RNA
ttgccatcaaaagtcctttt

SEQ ID NO: 4403 - RNA, 20 nt, synthetic construct
  source 1..20: mol_type = other RNA
accccaaaaaggacttttga

SEQ ID NO: 4404 - RNA, 20 nt, synthetic construct
  source 1..20: mol_type = other RNA
cttttgatggcaaaaagatc

SEQ ID NO: 4405 - RNA, 20 nt, synthetic construct
  source 1..20: mol_type = other RNA
tcaggaatattttctcgagt

SEQ ID NO: 4406 - RNA, 20 nt, synthetic construct
  source 1..20: mol_type = other RNA
atattttctcgagttggatg

SEQ ID NO: 4407 - RNA, 20 nt, synthetic construct
  source 1..20: mol_type = other RNA
tttctcgagttggatgtgga

SEQ ID NO: 4408 - RNA, 20 nt, synthetic construct
  source 1..20: mol_type = other RNA
ctcgagttggatgtggaagg

SEQ ID NO: 4409 - RNA, 20 nt, synthetic construct
  source 1..20: mol_type = other RNA
gagttggatgtggaaggtgg

SEQ ID NO: 4410 - RNA, 20 nt, synthetic construct
  source 1..20: mol_type = other RNA
gatgtggaaggtggtggccc

SEQ ID NO: 4411 - RNA, 20 nt, synthetic construct
  source 1..20: mol_type = other RNA
atgtggaaggtggtggccca

SEQ ID NO: 4412 - RNA, 20 nt, synthetic construct
  source 1..20: mol_type = other RNA
tgtggaaggtggtggcccag

SEQ ID NO: 4413 - RNA, 20 nt, synthetic construct
  source 1..20: mol_type = other RNA
gtggaaggtggtggcccagg

SEQ ID NO: 4414 - RNA, 20 nt, synthetic construct
  source 1..20: mol_type = other RNA
ttgaaactgtgcttccccct

SEQ ID NO: 4415 - RNA, 20 nt, synthetic construct
  source 1..20: mol_type = other RNA
tttgaaactgtgcttccccc

SEQ ID NO: 4416 - RNA, 20 nt, synthetic construct
  source 1..20: mol_type = other RNA
ggggaagcacagtttcaaag

SEQ ID NO: 4417 - RNA, 20 nt, synthetic construct
  source 1..20: mol_type = other RNA
aaatgggcagtatttttaga

SEQ ID NO: 4418 - RNA, 20 nt, synthetic construct
  source 1..20: mol_type = other RNA
tctgtgtctttttggtaaat

SEQ ID NO: 4419 - RNA, 20 nt, synthetic construct
  source 1..20: mol_type = other RNA
gtctgtgtctttttggtaaa

SEQ ID NO: 4420 - RNA, 20 nt, synthetic construct
  source 1..20: mol_type = other RNA
aggcgcggtctgtgtctttt

SEQ ID NO: 4421 - RNA, 20 nt, synthetic construct
  source 1..20: mol_type = other RNA
gtgggggcagggcagaggcg

SEQ ID NO: 4422 - RNA, 20 nt, synthetic construct
  source 1..20: mol_type = other RNA
gccatgtgggggcagggcag

SEQ ID NO: 4423 - RNA, 20 nt, synthetic construct
  source 1..20: mol_type = other RNA
tgaggagccatgtgggggca

SEQ ID NO: 4424 - RNA, 20 nt, synthetic construct
  source 1..20: mol_type = other RNA
ttgaggagccatgtgggggc

SEQ ID NO: 4425 - RNA, 20 nt, synthetic construct
  source 1..20: mol_type = other RNA
gcctctgccctgcccccaca

SEQ ID NO: 4426 - RNA, 20 nt, synthetic construct
  source 1..20: mol_type = other RNA
ccttttgaggagccatgtgg

SEQ ID NO: 4427 - RNA, 20 nt, synthetic construct
  source 1..20: mol_type = other RNA
tccttttgaggagccatgtg

SEQ ID NO: 4428 - RNA, 20 nt, synthetic construct
  source 1..20: mol_type = other RNA
ctccttttgaggagccatgt

SEQ ID NO: 4429 - RNA, 20 nt, synthetic construct
  source 1..20: mol_type = other RNA
tctccttttgaggagccatg

SEQ ID NO: 4430 - RNA, 20 nt, synthetic construct
  source 1..20: mol_type = other RNA
cccccacatggctcctcaaa

SEQ ID NO: 4431 - RNA, 20 nt, synthetic construct
  source 1..20: mol_type = other RNA
caagacaatttctccttttg

SEQ ID NO: 4432 - RNA, 20 nt, synthetic construct
  source 1..20: mol_type = other RNA
ccggcgagggaaggcgtggg

SEQ ID NO: 4433 - RNA, 20 nt, synthetic construct
  source 1..20: mol_type = other RNA
accccggcgagggaaggcgt

SEQ ID NO: 4434 - RNA, 20 nt, synthetic construct
  source 1..20: mol_type = other RNA
caccccggcgagggaaggcg

SEQ ID NO: 4435 - RNA, 20 nt, synthetic construct
  source 1..20: mol_type = other RNA
cccagcaccccggcgaggga

SEQ ID NO: 4436 - RNA, 20 nt, synthetic construct
  source 1..20: mol_type = other RNA
ccacccacgccttccctcgc

SEQ ID NO: 4437 - RNA, 20 nt, synthetic construct
  source 1..20: mol_type = other RNA
cacccacgccttccctcgcc

SEQ ID NO: 4438 - RNA, 20 nt, synthetic construct
  source 1..20: mol_type = other RNA
acccacgccttccctcgccg

SEQ ID NO: 4439 - RNA, 20 nt, synthetic construct
  source 1..20: mol_type = other RNA
gccccccagcaccccggcga

SEQ ID NO: 4440 - RNA, 20 nt, synthetic construct
  source 1..20: mol_type = other RNA
ggccccccagcaccccggcg

SEQ ID NO: 4441 - RNA, 20 nt, synthetic construct
  source 1..20: mol_type = other RNA
gccttccctcgccggggtgc

SEQ ID NO: 4442 - RNA, 20 nt, synthetic construct
  source 1..20: mol_type = other RNA
ctgttggccccccagcaccc

SEQ ID NO: 4443 - RNA, 20 nt, synthetic construct
  source 1..20: mol_type = other RNA
ccttccctcgccggggtgct

SEQ ID NO: 4444 - RNA, 20 nt, synthetic construct
  source 1..20: mol_type = other RNA
cttccctcgccggggtgctg

SEQ ID NO: 4445 - RNA, 20 nt, synthetic construct
  source 1..20: mol_type = other RNA
ttccctcgccggggtgctgg

SEQ ID NO: 4446 - RNA, 20 nt, synthetic construct
  source 1..20: mol_type = other RNA
tccctcgccggggtgctggg

SEQ ID NO: 4447 - RNA, 20 nt, synthetic construct
  source 1..20: mol_type = other RNA
tagcctttttgaattgctgt

SEQ ID NO: 4448 - RNA, 20 nt, synthetic construct
  source 1..20: mol_type = other RNA
gggccaacagcaattcaaaa

SEQ ID NO: 4449 - RNA, 20 nt, synthetic construct
  source 1..20: mol_type = other RNA
aattcaaaaaggctatagag

SEQ ID NO: 4450 - RNA, 20 nt, synthetic construct
  source 1..20: mol_type = other RNA
attcaaaaaggctatagagt

SEQ ID NO: 4451 - RNA, 20 nt, synthetic construct
  source 1..20: mol_type = other RNA
tatagagtgggctgagactt

SEQ ID NO: 4452 - RNA, 20 nt, synthetic construct
  source 1..20: mol_type = other RNA
gtgggctgagactttggaga

SEQ ID NO: 4453 - RNA, 20 nt, synthetic construct
  source 1..20: mol_type = other RNA
tgggctgagactttggagat

SEQ ID NO: 4454 - RNA, 20 nt, synthetic construct
  source 1..20: mol_type = other RNA
gactttggagatgggtagtt

SEQ ID NO: 4455 - RNA, 20 nt, synthetic construct
  source 1..20: mol_type = other RNA
acaggctcagagggattagt

SEQ ID NO: 4456 - RNA, 20 nt, synthetic construct
  source 1..20: mol_type = other RNA
gacaggctcagagggattag

SEQ ID NO: 4457 - RNA, 20 nt, synthetic construct
  source 1..20: mol_type = other RNA
gatgaagagacaggctcaga

SEQ ID NO: 4458 - RNA, 20 nt, synthetic construct
  source 1..20: mol_type = other RNA
agatgaagagacaggctcag

SEQ ID NO: 4459 - RNA, 20 nt, synthetic construct
  source 1..20: mol_type = other RNA
tgtttttcagatgaagagac

SEQ ID NO: 4460 - RNA, 20 nt, synthetic construct
  source 1..20: mol_type = other RNA
tgtctcttcatctgaaaaac

SEQ ID NO: 4461 - RNA, 20 nt, synthetic construct
  source 1..20: mol_type = other RNA
gatgtgtaagttagaccaaa

SEQ ID NO: 4462 - RNA, 20 nt, synthetic construct
  source 1..20: mol_type = other RNA
atgtgtaagttagaccaaat

SEQ ID NO: 4463 - RNA, 20 nt, synthetic construct
  source 1..20: mol_type = other RNA
tgtgtaagttagaccaaatg

SEQ ID NO: 4464 - RNA, 20 nt, synthetic construct
  source 1..20: mol_type = other RNA
ctcgtaggcattaccccatt

SEQ ID NO: 4465 - RNA, 20 nt, synthetic construct
  source 1..20: mol_type = other RNA
taccaaatgacatgactcgt

SEQ ID NO: 4466 - RNA, 20 nt, synthetic construct
  source 1..20: mol_type = other RNA
tgcctacgagtcatgtcatt

SEQ ID NO: 4467 - RNA, 20 nt, synthetic construct
  source 1..20: mol_type = other RNA
gagtcatgtcatttggtacc

SEQ ID NO: 4468 - RNA, 20 nt, synthetic construct
  source 1..20: mol_type = other RNA
cacagtgtccagcaagtgcc

SEQ ID NO: 4469 - RNA, 20 nt, synthetic construct
  source 1..20: mol_type = other RNA
atttggtacctggcacttgc

SEQ ID NO: 4470 - RNA, 20 nt, synthetic construct
  source 1..20: mol_type = other RNA
ctagttctatatcattgcca

SEQ ID NO: 4471 - RNA, 20 nt, synthetic construct
  source 1..20: mol_type = other RNA
tggcagcctctcttcatccg

SEQ ID NO: 4472 - RNA, 20 nt, synthetic construct
  source 1..20: mol_type = other RNA
tcattgccacggatgaagag

SEQ ID NO: 4473 - RNA, 20 nt, synthetic construct
  source 1..20: mol_type = other RNA
tctcagcatgtttctgcgca

SEQ ID NO: 4474 - RNA, 20 nt, synthetic construct
  source 1..20: mol_type = other RNA
cgcagaaacatgctgagagc

SEQ ID NO: 4475 - RNA, 20 nt, synthetic construct
  source 1..20: mol_type = other RNA
gcagaaacatgctgagagct

SEQ ID NO: 4476 - RNA, 20 nt, synthetic construct
  source 1..20: mol_type = other RNA
acatgctgagagctgggaga

SEQ ID NO: 4477 - RNA, 20 nt, synthetic construct
  source 1..20: mol_type = other RNA
gctgggagaaggtgagctag

SEQ ID NO: 4478 - RNA, 20 nt, synthetic construct
  source 1..20: mol_type = other RNA
ctgggagaaggtgagctaga

SEQ ID NO: 4479 - RNA, 20 nt, synthetic construct
  source 1..20: mol_type = other RNA
ttcagctctccctgagggca

SEQ ID NO: 4480 - RNA, 20 nt, synthetic construct
  source 1..20: mol_type = other RNA
gggatacagtccctgccctc

SEQ ID NO: 4481 - RNA, 20 nt, synthetic construct
  source 1..20: mol_type = other RNA
cttcagctctccctgagggc

SEQ ID NO: 4482 - RNA, 20 nt, synthetic construct
  source 1..20: mol_type = other RNA
ggatacagtccctgccctca

SEQ ID NO: 4483 - RNA, 20 nt, synthetic construct
  source 1..20: mol_type = other RNA
agcccttcagctctccctga

SEQ ID NO: 4484 - RNA, 20 nt, synthetic construct
  source 1..20: mol_type = other RNA
gagcccttcagctctccctg

SEQ ID NO: 4485 - RNA, 20 nt, synthetic construct
  source 1..20: mol_type = other RNA
ctgccctcagggagagctga

SEQ ID NO: 4486 - RNA, 20 nt, synthetic construct
  source 1..20: mol_type = other RNA
tgccctcagggagagctgaa

SEQ ID NO: 4487 - RNA, 20 nt, synthetic construct
  source 1..20: mol_type = other RNA
aagggctctctctcctgcca

SEQ ID NO: 4488 - RNA, 20 nt, synthetic construct
  source 1..20: mol_type = other RNA
agggctctctctcctgccac

SEQ ID NO: 4489 - RNA, 20 nt, synthetic construct
  source 1..20: mol_type = other RNA
ggccctgatcatcccgtggc

SEQ ID NO: 4490 - RNA, 20 nt, synthetic construct
  source 1..20: mol_type = other RNA
agatggccctgatcatcccg

SEQ ID NO: 4491 - RNA, 20 nt, synthetic construct
  source 1..20: mol_type = other RNA
tctcctgccacgggatgatc

SEQ ID NO: 4492 - RNA, 20 nt, synthetic construct
  source 1..20: mol_type = other RNA
ctcctgccacgggatgatca

SEQ ID NO: 4493 - RNA, 20 nt, synthetic construct
  source 1..20: mol_type = other RNA
agcgggatggagggaaaaga

SEQ ID NO: 4494 - RNA, 20 nt, synthetic construct
  source 1..20: mol_type = other RNA
cattgccagagcgggatgga

SEQ ID NO: 4495 - RNA, 20 nt, synthetic construct
  source 1..20: mol_type = other RNA
acattgccagagcgggatgg

SEQ ID NO: 4496 - RNA, 20 nt, synthetic construct
  source 1..20: mol_type = other RNA
accacattgccagagcggga

SEQ ID NO: 4497 - RNA, 20 nt, synthetic construct
  source 1..20: mol_type = other RNA
cttttccctccatcccgctc

SEQ ID NO: 4498 - RNA, 20 nt, synthetic construct
  source 1..20: mol_type = other RNA
ccaaaccacattgccagagc

SEQ ID NO: 4499 - RNA, 20 nt, synthetic construct
  source 1..20: mol_type = other RNA
tccaaaccacattgccagag

SEQ ID NO: 4500 - RNA, 20 nt, synthetic construct
  source 1..20: mol_type = other RNA
tccatcccgctctggcaatg

SEQ ID NO: 4501 - RNA, 20 nt, synthetic construct
  source 1..20: mol_type = other RNA
cccgctctggcaatgtggtt

SEQ ID NO: 4502 - RNA, 20 nt, synthetic construct
  source 1..20: mol_type = other RNA
ttggagaaacagtccaatga

SEQ ID NO: 4503 - RNA, 20 nt, synthetic construct
  source 1..20: mol_type = other RNA
tggagaaacagtccaatgaa

SEQ ID NO: 4504 - RNA, 20 nt, synthetic construct
  source 1..20: mol_type = other RNA
ggagaaacagtccaatgaag

SEQ ID NO: 4505 - RNA, 20 nt, synthetic construct
  source 1..20: mol_type = other RNA
tgcttcaaaggccccttcat

SEQ ID NO: 4506 - RNA, 20 nt, synthetic construct
  source 1..20: mol_type = other RNA
atgcttaggaagtgcttcaa

SEQ ID NO: 4507 - RNA, 20 nt, synthetic construct
  source 1..20: mol_type = other RNA
tcctatgtctatagatgctt

SEQ ID NO: 4508 - RNA, 20 nt, synthetic construct
  source 1..20: mol_type = other RNA
tcctaagcatctatagacat

SEQ ID NO: 4509 - RNA, 20 nt, synthetic construct
  source 1..20: mol_type = other RNA
atctatagacataggaaact

SEQ ID NO: 4510 - RNA, 20 nt, synthetic construct
  source 1..20: mol_type = other RNA
agacataggaaacttggctc

SEQ ID NO: 4511 - RNA, 20 nt, synthetic construct
  source 1..20: mol_type = other RNA
gacataggaaacttggctct

SEQ ID NO: 4512 - RNA, 20 nt, synthetic construct
  source 1..20: mol_type = other RNA
acataggaaacttggctctg

SEQ ID NO: 4513 - RNA, 20 nt, synthetic construct
  source 1..20: mol_type = other RNA
aaacttggctctggggatag

SEQ ID NO: 4514 - RNA, 20 nt, synthetic construct
  source 1..20: mol_type = other RNA
ttggctctggggatagagga

SEQ ID NO: 4515 - RNA, 20 nt, synthetic construct
  source 1..20: mol_type = other RNA
atctacttgaatcttggcat

SEQ ID NO: 4516 - RNA, 20 nt, synthetic construct
  source 1..20: mol_type = other RNA
gatctacttgaatcttggca

SEQ ID NO: 4517 - RNA, 20 nt, synthetic construct
  source 1..20: mol_type = other RNA
accaagatctacttgaatct

SEQ ID NO: 4518 - RNA, 20 nt, synthetic construct
  source 1..20: mol_type = other RNA
gccaagattcaagtagatct

SEQ ID NO: 4519 - RNA, 20 nt, synthetic construct
  source 1..20: mol_type = other RNA
caagtagatcttggtgtgac

SEQ ID NO: 4520 - RNA, 20 nt, synthetic construct
  source 1..20: mol_type = other RNA
aagtagatcttggtgtgact

SEQ ID NO: 4521 - RNA, 20 nt, synthetic construct
  source 1..20: mol_type = other RNA
tagatcttggtgtgactggg

SEQ ID NO: 4522 - RNA, 20 nt, synthetic construct
  source 1..20: mol_type = other RNA
gtgtgactgggaggcagctg

SEQ ID NO: 4523 - RNA, 20 nt, synthetic construct
  source 1..20: mol_type = other RNA
gggaggcagctgtggcgttg

SEQ ID NO: 4524 - RNA, 20 nt, synthetic construct
  source 1..20: mol_type = other RNA
ggaggcagctgtggcgttgt

SEQ ID NO: 4525 - RNA, 20 nt, synthetic construct
  source 1..20: mol_type = other RNA
gaggcagctgtggcgttgtg

SEQ ID NO: 4526 - RNA, 20 nt, synthetic construct
  source 1..20: mol_type = other RNA
aaattcaggcccaagactct

SEQ ID NO: 4527 - RNA, 20 nt, synthetic construct
  source 1..20: mol_type = other RNA
tgtggggaaacctagagtct

SEQ ID NO: 4528 - RNA, 20 nt, synthetic construct
  source 1..20: mol_type = other RNA
gtggggaaacctagagtctt

SEQ ID NO: 4529 - RNA, 20 nt, synthetic construct
  source 1..20: mol_type = other RNA
gggtgtcaaagctgaaattc

SEQ ID NO: 4530 - RNA, 20 nt, synthetic construct
  source 1..20: mol_type = other RNA
aggaagcccattacattaga

SEQ ID NO: 4531 - RNA, 20 nt, synthetic construct
  source 1..20: mol_type = other RNA
aaggaagcccattacattag

SEQ ID NO: 4532 - RNA, 20 nt, synthetic construct
  source 1..20: mol_type = other RNA
tttgacaccctctaatgtaa

SEQ ID NO: 4533 - RNA, 20 nt, synthetic construct
  source 1..20: mol_type = other RNA
ttgacaccctctaatgtaat

SEQ ID NO: 4534 - RNA, 20 nt, synthetic construct
  source 1..20: mol_type = other RNA
tgtgggaagcctacagtcaa

SEQ ID NO: 4535 - RNA, 20 nt, synthetic construct
  source 1..20: mol_type = other RNA
aatgggcttcctttgactgt

SEQ ID NO: 4536 - RNA, 20 nt, synthetic construct
  source 1..20: mol_type = other RNA
gtgtggggtgccagctatgt

SEQ ID NO: 4537 - RNA, 20 nt, synthetic construct
  source 1..20: mol_type = other RNA
ctgtaggcttcccacatagc

SEQ ID NO: 4538 - RNA, 20 nt, synthetic construct
  source 1..20: mol_type = other RNA
tgtgtggggtgccagctatg

SEQ ID NO: 4539 - RNA, 20 nt, synthetic construct
  source 1..20: mol_type = other RNA
ggccaagggagttctgtgtg

SEQ ID NO: 4540 - RNA, 20 nt, synthetic construct
  source 1..20: mol_type = other RNA
aggccaagggagttctgtgt

SEQ ID NO: 4541 - RNA, 20 nt, synthetic construct
  source 1..20: mol_type = other RNA
aaggccaagggagttctgtg

SEQ ID NO: 4542 - RNA, 20 nt, synthetic construct
  source 1..20: mol_type = other RNA
caccccacacagaactccct

SEQ ID NO: 4543 - RNA, 20 nt, synthetic construct
  source 1..20: mol_type = other RNA
caggatcatcagaaggccaa

SEQ ID NO: 4544 - RNA, 20 nt, synthetic construct
  source 1..20: mol_type = other RNA
gcaggatcatcagaaggcca

SEQ ID NO: 4545 - RNA, 20 nt, synthetic construct
  source 1..20: mol_type = other RNA
tgtcctgcaggatcatcaga

SEQ ID NO: 4546 - RNA, 20 nt, synthetic construct
  source 1..20: mol_type = other RNA
tggccttctgatgatcctgc

SEQ ID NO: 4547 - RNA, 20 nt, synthetic construct
  source 1..20: mol_type = other RNA
aacaaaaaagattgtcctgc

SEQ ID NO: 4548 - RNA, 20 nt, synthetic construct
  source 1..20: mol_type = other RNA
tttttgttttttttttgaga

SEQ ID NO: 4549 - RNA, 20 nt, synthetic construct
  source 1..20: mol_type = other RNA
ggtatctcactttgtcgccc

SEQ ID NO: 4550 - RNA, 20 nt, synthetic construct
  source 1..20: mol_type = other RNA
tctcactttgtcgcccaggc

SEQ ID NO: 4551 - RNA, 20 nt, synthetic construct
  source 1..20: mol_type = other RNA
gcgccactgcactccagcct

SEQ ID NO: 4552 - RNA, 20 nt, synthetic construct
  source 1..20: mol_type = other RNA
tgcgccactgcactccagcc

SEQ ID NO: 4553 - RNA, 20 nt, synthetic construct
  source 1..20: mol_type = other RNA
tcgcccaggctggagtgcag

SEQ ID NO: 4554 - RNA, 20 nt, synthetic construct
  source 1..20: mol_type = other RNA
ggagtgcagtggcgcagtct

SEQ ID NO: 4555 - RNA, 20 nt, synthetic construct
  source 1..20: mol_type = other RNA
cgcttgaacctgggaggcag

SEQ ID NO: 4556 - RNA, 20 nt, synthetic construct
  source 1..20: mol_type = other RNA
cactgcagcctctgcctccc

SEQ ID NO: 4557 - RNA, 20 nt, synthetic construct
  source 1..20: mol_type = other RNA
gagaatcgcttgaacctggg

SEQ ID NO: 4558 - RNA, 20 nt, synthetic construct
  source 1..20: mol_type = other RNA
caggagaatcgcttgaacct

SEQ ID NO: 4559 - RNA, 20 nt, synthetic construct
  source 1..20: mol_type = other RNA
gcaggagaatcgcttgaacc

SEQ ID NO: 4560 - RNA, 20 nt, synthetic construct
  source 1..20: mol_type = other RNA
gctacttgggaggctgaggc

SEQ ID NO: 4561 - RNA, 20 nt, synthetic construct
  source 1..20: mol_type = other RNA
cccagctacttgggaggctg

SEQ ID NO: 4562 - RNA, 20 nt, synthetic construct
  source 1..20: mol_type = other RNA
tgtaatcccagctacttggg

SEQ ID NO: 4563 - RNA, 20 nt, synthetic construct
  source 1..20: mol_type = other RNA
ttctgtaatcccagctactt

SEQ ID NO: 4564 - RNA, 20 nt, synthetic construct
  source 1..20: mol_type = other RNA
gcctcagcctcccaagtagc

SEQ ID NO: 4565 - RNA, 20 nt, synthetic construct
  source 1..20: mol_type = other RNA
cttctgtaatcccagctact

SEQ ID NO: 4566 - RNA, 20 nt, synthetic construct
  source 1..20: mol_type = other RNA
cctcagcctcccaagtagct

SEQ ID NO: 4567 - RNA, 20 nt, synthetic construct
  source 1..20: mol_type = other RNA
acaaaattagccaggcatgg

SEQ ID NO: 4568 - RNA, 20 nt, synthetic construct
  source 1..20: mol_type = other RNA
cagaagcacgccaccatgcc

SEQ ID NO: 4569 - RNA, 20 nt, synthetic construct
  source 1..20: mol_type = other RNA
aatacaaaattagccaggca

SEQ ID NO: 4570 - RNA, 20 nt, synthetic construct
  source 1..20: mol_type = other RNA
ctaaaaatacaaaattagcc

SEQ ID NO: 4571 - RNA, 20 nt, synthetic construct
  source 1..20: mol_type = other RNA
ttttgtatttttagtagaga

SEQ ID NO: 4572 - RNA, 20 nt, synthetic construct
  source 1..20: mol_type = other RNA
tttgtatttttagtagagac

SEQ ID NO: 4573 - RNA, 20 nt, synthetic construct
  source 1..20: mol_type = other RNA
tgagaccagcccgggcaaca

SEQ ID NO: 4574 - RNA, 20 nt, synthetic construct
  source 1..20: mol_type = other RNA
cgggatttcaccatgttgcc

SEQ ID NO: 4575 - RNA, 20 nt, synthetic construct
  source 1..20: mol_type = other RNA
gggatttcaccatgttgccc

SEQ ID NO: 4576 - RNA, 20 nt, synthetic construct
  source 1..20: mol_type = other RNA
tttcaccatgttgcccgggc

SEQ ID NO: 4577 - RNA, 20 nt, synthetic construct
  source 1..20: mol_type = other RNA
caggagtttgagaccagccc

SEQ ID NO: 4578 - RNA, 20 nt, synthetic construct
  source 1..20: mol_type = other RNA
tcaggagtttgagaccagcc

SEQ ID NO: 4579 - RNA, 20 nt, synthetic construct
  source 1..20: mol_type = other RNA
caggcagatcacttgaggtc

SEQ ID NO: 4580 - RNA, 20 nt, synthetic construct
  source 1..20: mol_type = other RNA
cgaggcaggcagatcacttg

SEQ ID NO: 4581 - RNA, 20 nt, synthetic construct
  source 1..20: mol_type = other RNA
ctcaagtgatctgcctgcct

SEQ ID NO: 4582 - RNA, 20 nt, synthetic construct
  source 1..20: mol_type = other RNA
ccactgtgggaggccgaggc

SEQ ID NO: 4583 - RNA, 20 nt, synthetic construct
  source 1..20: mol_type = other RNA
cccaccactgtgggaggccg

SEQ ID NO: 4584 - RNA, 20 nt, synthetic construct
  source 1..20: mol_type = other RNA
ttgcagcccaccactgtggg

SEQ ID NO: 4585 - RNA, 20 nt, synthetic construct
  source 1..20: mol_type = other RNA
cctgcctcggcctcccacag

SEQ ID NO: 4586 - RNA, 20 nt, synthetic construct
  source 1..20: mol_type = other RNA
gccttgcagcccaccactgt

SEQ ID NO: 4587 - RNA, 20 nt, synthetic construct
  source 1..20: mol_type = other RNA
gcctcggcctcccacagtgg

SEQ ID NO: 4588 - RNA, 20 nt, synthetic construct
  source 1..20: mol_type = other RNA
tgccttgcagcccaccactg

SEQ ID NO: 4589 - RNA, 20 nt, synthetic construct
  source 1..20: mol_type = other RNA
cctcggcctcccacagtggt

SEQ ID NO: 4590 - RNA, 20 nt, synthetic construct
  source 1..20: mol_type = other RNA
tcccacagtggtgggctgca

SEQ ID NO: 4591 - RNA, 20 nt, synthetic construct
  source 1..20: mol_type = other RNA
agttttcccaatattagttc

SEQ ID NO: 4592 - RNA, 20 nt, synthetic construct
  source 1..20: mol_type = other RNA
tcattctccagaactaatat

SEQ ID NO: 4593 - RNA, 20 nt, synthetic construct
  source 1..20: mol_type = other RNA
cattctccagaactaatatt

SEQ ID NO: 4594 - RNA, 20 nt, synthetic construct
  source 1..20: mol_type = other RNA
gggaaaactgatgttcagag

SEQ ID NO: 4595 - RNA, 20 nt, synthetic construct
  source 1..20: mol_type = other RNA
ttcagagaggtcaagtgact

SEQ ID NO: 4596 - RNA, 20 nt, synthetic construct
  source 1..20: mol_type = other RNA
gaggtcaagtgacttggcta

SEQ ID NO: 4597 - RNA, 20 nt, synthetic construct
  source 1..20: mol_type = other RNA
aggagcttgcatctgaattc

SEQ ID NO: 4598 - RNA, 20 nt, synthetic construct
  source 1..20: mol_type = other RNA
tgtccaaggtcatgtggttt

SEQ ID NO: 4599 - RNA, 20 nt, synthetic construct
  source 1..20: mol_type = other RNA
atggcttgtccaaggtcatg

SEQ ID NO: 4600 - RNA, 20 nt, synthetic construct
  source 1..20: mol_type = other RNA
gctcctaaaccacatgacct

SEQ ID NO: 4601 - RNA, 20 nt, synthetic construct
  source 1..20: mol_type = other RNA
tcagtgaaatggcttgtcca

SEQ ID NO: 4602 - RNA, 20 nt, synthetic construct
  source 1..20: mol_type = other RNA
gttcacacgcctcagtgaaa

SEQ ID NO: 4603 - RNA, 20 nt, synthetic construct
  source 1..20: mol_type = other RNA
ttggacaagccatttcactg

SEQ ID NO: 4604 - RNA, 20 nt, synthetic construct
  source 1..20: mol_type = other RNA
tgcccatttgagcttagagg

SEQ ID NO: 4605 - RNA, 20 nt, synthetic construct
  source 1..20: mol_type = other RNA
ttatgcccatttgagcttag

SEQ ID NO: 4606 - RNA, 20 nt, synthetic construct
  source 1..20: mol_type = other RNA
gaacctcctctaagctcaaa

SEQ ID NO: 4607 - RNA, 20 nt, synthetic construct
  source 1..20: mol_type = other RNA
aacctcctctaagctcaaat

SEQ ID NO: 4608 - RNA, 20 nt, synthetic construct
  source 1..20: mol_type = other RNA
aaagctctggggaaaaggca

SEQ ID NO: 4609 - RNA, 20 nt, synthetic construct
  source 1..20: mol_type = other RNA
aaaagctctggggaaaaggc

SEQ ID NO: 4610 - RNA, 20 nt, synthetic construct
  source 1..20: mol_type = other RNA
cccaaaaagctctggggaaa

SEQ ID NO: 4611 - RNA, 20 nt, synthetic construct
  source 1..20: mol_type = other RNA
tgagttcccaaaaagctctg

SEQ ID NO: 4612 - RNA, 20 nt, synthetic construct
  source 1..20: mol_type = other RNA
ctgagttcccaaaaagctct

SEQ ID NO: 4613 - RNA, 20 nt, synthetic construct
  source 1..20: mol_type = other RNA
tctgagttcccaaaaagctc

SEQ ID NO: 4614 - RNA, 20 nt, synthetic construct
  source 1..20: mol_type = other RNA
gccttttccccagagctttt

SEQ ID NO: 4615 - RNA, 20 nt, synthetic construct
  source 1..20: mol_type = other RNA
ccttttccccagagcttttt

SEQ ID NO: 4616 - RNA, 20 nt, synthetic construct
  source 1..20: mol_type = other RNA
gagctttttgggaactcaga

SEQ ID NO: 4617 - RNA, 20 nt, synthetic construct
  source 1..20: mol_type = other RNA
ttttgggaactcagatggtg

SEQ ID NO: 4618 - RNA, 20 nt, synthetic construct
  source 1..20: mol_type = other RNA
tgggaactcagatggtgtgg

SEQ ID NO: 4619 - RNA, 20 nt, synthetic construct
  source 1..20: mol_type = other RNA
aactcagatggtgtggagga

SEQ ID NO: 4620 - RNA, 20 nt, synthetic construct
  source 1..20: mol_type = other RNA
tcagatggtgtggaggatgg

SEQ ID NO: 4621 - RNA, 20 nt, synthetic construct
  source 1..20: mol_type = other RNA
caaggatttgcagctcacag

SEQ ID NO: 4622 - RNA, 20 nt, synthetic construct
  source 1..20: mol_type = other RNA
cacttcctcttgggtgatca

SEQ ID NO: 4623 - RNA, 20 nt, synthetic construct
  source 1..20: mol_type = other RNA
caaatccttgatcacccaag

SEQ ID NO: 4624 - RNA, 20 nt, synthetic construct
  source 1..20: mol_type = other RNA
caccttaagcacttcctctt

SEQ ID NO: 4625 - RNA, 20 nt, synthetic construct
  source 1..20: mol_type = other RNA
gcaccttaagcacttcctct

SEQ ID NO: 4626 - RNA, 20 nt, synthetic construct
  source 1..20: mol_type = other RNA
cacccaagaggaagtgctta

SEQ ID NO: 4627 - RNA, 20 nt, synthetic construct
  source 1..20: mol_type = other RNA
agaggaagtgcttaaggtgc

SEQ ID NO: 4628 - RNA, 20 nt, synthetic construct
  source 1..20: mol_type = other RNA
aaggtgcaggcttcagtctt

SEQ ID NO: 4629 - RNA, 20 nt, synthetic construct
  source 1..20: mol_type = other RNA
aggtgcaggcttcagtctta

SEQ ID NO: 4630 - RNA, 20 nt, synthetic construct
  source 1..20: mol_type = other RNA
ggcttcagtcttagggaagc

SEQ ID NO: 4631 - RNA, 20 nt, synthetic construct
  source 1..20: mol_type = other RNA
agtcttagggaagcaggaag

SEQ ID NO: 4632 - RNA, 20 nt, synthetic construct
  source 1..20: mol_type = other RNA
gtcttagggaagcaggaagt

SEQ ID NO: 4633 - RNA, 20 nt, synthetic construct
  source 1..20: mol_type = other RNA
tcttagggaagcaggaagtg

SEQ ID NO: 4634 - RNA, 20 nt, synthetic construct
  source 1..20: mol_type = other RNA
tggggcgctgaaatgtgtat

SEQ ID NO: 4635 - RNA, 20 nt, synthetic construct
  source 1..20: mol_type = other RNA
ggggcgctgaaatgtgtatt

SEQ ID NO: 4636 - RNA, 20 nt, synthetic construct
  source 1..20: mol_type = other RNA
gggcgctgaaatgtgtattg

SEQ ID NO: 4637 - RNA, 20 nt, synthetic construct
  source 1..20: mol_type = other RNA
ggcgctgaaatgtgtattgg

SEQ ID NO: 4638 - RNA, 20 nt, synthetic construct
  source 1..20: mol_type = other RNA
aaatgtgtattgggggcttc

SEQ ID NO: 4639 - RNA, 20 nt, synthetic construct
  source 1..20: mol_type = other RNA
aatgtgtattgggggcttct

SEQ ID NO: 4640 - RNA, 20 nt, synthetic construct
  source 1..20: mol_type = other RNA
gtgtattgggggcttctggg

SEQ ID NO: 4641 - RNA, 20 nt, synthetic construct
  source 1..20: mol_type = other RNA
tgtattgggggcttctggga

SEQ ID NO: 4642 - RNA, 20 nt, synthetic construct
  source 1..20: mol_type = other RNA
gtattgggggcttctgggag

SEQ ID NO: 4643 - RNA, 20 nt, synthetic construct
  source 1..20: mol_type = other RNA
tattgggggcttctgggagg

SEQ ID NO: 4644 - RNA, 20 nt, synthetic construct
  source 1..20: mol_type = other RNA
gagggggtttcttcttgtcc

SEQ ID NO: 4645 - RNA, 20 nt, synthetic construct
  source 1..20: mol_type = other RNA
tctgcgtcattggctcaacc

SEQ ID NO: 4646 - RNA, 20 nt, synthetic construct
  source 1..20: mol_type = other RNA
gggcctaagatctgcgtcat

SEQ ID NO: 4647 - RNA, 20 nt, synthetic construct
  source 1..20: mol_type = other RNA
gagccaatgacgcagatctt

SEQ ID NO: 4648 - RNA, 20 nt, synthetic construct
  source 1..20: mol_type = other RNA
gacgcagatcttaggccctc

SEQ ID NO: 4649 - RNA, 20 nt, synthetic construct
  source 1..20: mol_type = other RNA
ctgggcaaaaagtcaccaga

SEQ ID NO: 4650 - RNA, 20 nt, synthetic construct
  source 1..20: mol_type = other RNA
cctgggcaaaaagtcaccag

SEQ ID NO: 4651 - RNA, 20 nt, synthetic construct
  source 1..20: mol_type = other RNA
cctctggtgactttttgccc

SEQ ID NO: 4652 - RNA, 20 nt, synthetic construct
  source 1..20: mol_type = other RNA
ccaccactgagaagttgcct

SEQ ID NO: 4653 - RNA, 20 nt, synthetic construct
  source 1..20: mol_type = other RNA
accaccactgagaagttgcc

SEQ ID NO: 4654 - RNA, 20 nt, synthetic construct
  source 1..20: mol_type = other RNA
ttgcccaggcaacttctcag

SEQ ID NO: 4655 - RNA, 20 nt, synthetic construct
  source 1..20: mol_type = other RNA
cccaggcaacttctcagtgg

SEQ ID NO: 4656 - RNA, 20 nt, synthetic construct
  source 1..20: mol_type = other RNA
caacttctcagtggtggtga

SEQ ID NO: 4657 - RNA, 20 nt, synthetic construct
  source 1..20: mol_type = other RNA
aacttctcagtggtggtgat

SEQ ID NO: 4658 - RNA, 20 nt, synthetic construct
  source 1..20: mol_type = other RNA
acttctcagtggtggtgatg

SEQ ID NO: 4659 - RNA, 20 nt, synthetic construct
  source 1..20: mol_type = other RNA
agtggtggtgatggggagcg

SEQ ID NO: 4660 - RNA, 20 nt, synthetic construct
  source 1..20: mol_type = other RNA
gcagggcagcttggatggtc

SEQ ID NO: 4661 - RNA, 20 nt, synthetic construct
  source 1..20: mol_type = other RNA
agccagcagggcagcttgga

SEQ ID NO: 4662 - RNA, 20 nt, synthetic construct
  source 1..20: mol_type = other RNA
ccacagccagcagggcagct

SEQ ID NO: 4663 - RNA, 20 nt, synthetic construct
  source 1..20: mol_type = other RNA
gaccatccaagctgccctgc

SEQ ID NO: 4664 - RNA, 20 nt, synthetic construct
  source 1..20: mol_type = other RNA
aaaggcccccacagccagca

SEQ ID NO: 4665 - RNA, 20 nt, synthetic construct
  source 1..20: mol_type = other RNA
aaaaggcccccacagccagc

SEQ ID NO: 4666 - RNA, 20 nt, synthetic construct
  source 1..20: mol_type = other RNA
ccaagctgccctgctggctg

SEQ ID NO: 4667 - RNA, 20 nt, synthetic construct
  source 1..20: mol_type = other RNA
caagctgccctgctggctgt

SEQ ID NO: 4668 - RNA, 20 nt, synthetic construct
  source 1..20: mol_type = other RNA
aagctgccctgctggctgtg

SEQ ID NO: 4669 - RNA, 20 nt, synthetic construct
  source 1..20: mol_type = other RNA
agctgccctgctggctgtgg

SEQ ID NO: 4670 - RNA, 20 nt, synthetic construct
  source 1..20: mol_type = other RNA
gtgtctcagaaaaaaaaaaa

SEQ ID NO: 4671 - RNA, 20 nt, synthetic construct
  source 1..20: mol_type = other RNA
tttttttctgagacacagtc

SEQ ID NO: 4672 - RNA, 20 nt, synthetic construct
  source 1..20: mol_type = other RNA
acagtctggctctatcaccc

SEQ ID NO: 4673 - RNA, 20 nt, synthetic construct
  source 1..20: mol_type = other RNA
tctggctctatcacccaggc

SEQ ID NO: 4674 - RNA, 20 nt, synthetic construct
  source 1..20: mol_type = other RNA
gcaccactgcactccagcct

SEQ ID NO: 4675 - RNA, 20 nt, synthetic construct
  source 1..20: mol_type = other RNA
tgcaccactgcactccagcc

SEQ ID NO: 4676 - RNA, 20 nt, synthetic construct
  source 1..20: mol_type = other RNA
tcacccaggctggagtgcag

SEQ ID NO: 4677 - RNA, 20 nt, synthetic construct
  source 1..20: mol_type = other RNA
ttgagcctggggaggtgtca

SEQ ID NO: 4678 - RNA, 20 nt, synthetic construct
  source 1..20: mol_type = other RNA
tgcagccttgacacctcccc

SEQ ID NO: 4679 - RNA, 20 nt, synthetic construct
  source 1..20: mol_type = other RNA
aggatagcttgagcctgggg

SEQ ID NO: 4680 - RNA, 20 nt, synthetic construct
  source 1..20: mol_type = other RNA
gggaggatagcttgagcctg

SEQ ID NO: 4681 - RNA, 20 nt, synthetic construct
  source 1..20: mol_type = other RNA
tgggaggatagcttgagcct

SEQ ID NO: 4682 - RNA, 20 nt, synthetic construct
  source 1..20: mol_type = other RNA
gtgggaggatagcttgagcc

SEQ ID NO: 4683 - RNA, 20 nt, synthetic construct
  source 1..20: mol_type = other RNA
actcaggaggctgaggtggg

SEQ ID NO: 4684 - RNA, 20 nt, synthetic construct
  source 1..20: mol_type = other RNA
gctactcaggaggctgaggt

SEQ ID NO: 4685 - RNA, 20 nt, synthetic construct
  source 1..20: mol_type = other RNA
agctactcaggaggctgagg

SEQ ID NO: 4686 - RNA, 20 nt, synthetic construct
  source 1..20: mol_type = other RNA
accagctactcaggaggctg

SEQ ID NO: 4687 - RNA, 20 nt, synthetic construct
  source 1..20: mol_type = other RNA
tgtagaaccagctactcagg

SEQ ID NO: 4688 - RNA, 20 nt, synthetic construct
  source 1..20: mol_type = other RNA
atctgtagaaccagctactc

SEQ ID NO: 4689 - RNA, 20 nt, synthetic construct
  source 1..20: mol_type = other RNA
acctcagcctcctgagtagc

SEQ ID NO: 4690 - RNA, 20 nt, synthetic construct
  source 1..20: mol_type = other RNA
acacaaaacttagctgggcg

SEQ ID NO: 4691 - RNA, 20 nt, synthetic construct
  source 1..20: mol_type = other RNA
aaataacacaaaacttagct

SEQ ID NO: 4692 - RNA, 20 nt, synthetic construct
  source 1..20: mol_type = other RNA
caaataacacaaaacttagc

SEQ ID NO: 4693 - RNA, 20 nt, synthetic construct
  source 1..20: mol_type = other RNA
tttgtgttatttgtagagat

SEQ ID NO: 4694 - RNA, 20 nt, synthetic construct
  source 1..20: mol_type = other RNA
ttgtgttatttgtagagata

SEQ ID NO: 4695 - RNA, 20 nt, synthetic construct
  source 1..20: mol_type = other RNA
tgagaccagcctgggcaaca

SEQ ID NO: 4696 - RNA, 20 nt, synthetic construct
  source 1..20: mol_type = other RNA
agggcttcaccatgttgccc

SEQ ID NO: 4697 - RNA, 20 nt, synthetic construct
  source 1..20: mol_type = other RNA
cttcaccatgttgcccaggc

SEQ ID NO: 4698 - RNA, 20 nt, synthetic construct
  source 1..20: mol_type = other RNA
caggagtttgagaccagcct

SEQ ID NO: 4699 - RNA, 20 nt, synthetic construct
  source 1..20: mol_type = other RNA
ccaggagtttgagaccagcc

SEQ ID NO: 4700 - RNA, 20 nt, synthetic construct
  source 1..20: mol_type = other RNA
ccaggctggtctcaaactcc

SEQ ID NO: 4701 - RNA, 20 nt, synthetic construct
  source 1..20: mol_type = other RNA
ggtctcaaactcctggactg

SEQ ID NO: 4702 - RNA, 20 nt, synthetic construct
  source 1..20: mol_type = other RNA
caggagtatcacctcagtcc

SEQ ID NO: 4703 - RNA, 20 nt, synthetic construct
  source 1..20: mol_type = other RNA
ctgaggtgatactcctgcct

SEQ ID NO: 4704 - RNA, 20 nt, synthetic construct
  source 1..20: mol_type = other RNA
gcactttgggagtccaaggc

SEQ ID NO: 4705 - RNA, 20 nt, synthetic construct
  source 1..20: mol_type = other RNA
tccagcactttgggagtcca

SEQ ID NO: 4706 - RNA, 20 nt, synthetic construct
  source 1..20: mol_type = other RNA
tgtagaaattccagcacttt

SEQ ID NO: 4707 - RNA, 20 nt, synthetic construct
  source 1..20: mol_type = other RNA
gccttggactcccaaagtgc

SEQ ID NO: 4708 - RNA, 20 nt, synthetic construct
  source 1..20: mol_type = other RNA
ctgtagaaattccagcactt

SEQ ID NO: 4709 - RNA, 20 nt, synthetic construct
  source 1..20: mol_type = other RNA
gccccataggccgggcatgg

SEQ ID NO: 4710 - RNA, 20 nt, synthetic construct
  source 1..20: mol_type = other RNA
cagatgtgagccaccatgcc

SEQ ID NO: 4711 - RNA, 20 nt, synthetic construct
  source 1..20: mol_type = other RNA
agggccccataggccgggca

SEQ ID NO: 4712 - RNA, 20 nt, synthetic construct
  source 1..20: mol_type = other RNA
gagccaccatgcccggccta

SEQ ID NO: 4713 - RNA, 20 nt, synthetic construct
  source 1..20: mol_type = other RNA
caagaagggccccataggcc

SEQ ID NO: 4714 - RNA, 20 nt, synthetic construct
  source 1..20: mol_type = other RNA
agccaccatgcccggcctat

SEQ ID NO: 4715 - RNA, 20 nt, synthetic construct
  source 1..20: mol_type = other RNA
acaagaagggccccataggc

SEQ ID NO: 4716 - RNA, 20 nt, synthetic construct
  source 1..20: mol_type = other RNA
gccaccatgcccggcctatg

SEQ ID NO: 4717 - RNA, 20 nt, synthetic construct
  source 1..20: mol_type = other RNA
aggaacaagaagggccccat

SEQ ID NO: 4718 - RNA, 20 nt, synthetic construct
  source 1..20: mol_type = other RNA
agacttcataggaacaagaa

SEQ ID NO: 4719 - RNA, 20 nt, synthetic construct
  source 1..20: mol_type = other RNA
cagacttcataggaacaaga

SEQ ID NO: 4720 - RNA, 20 nt, synthetic construct
  source 1..20: mol_type = other RNA
ggggaccctgcagacttcat

SEQ ID NO: 4721 - RNA, 20 nt, synthetic construct
  source 1..20: mol_type = other RNA
cttgttcctatgaagtctgc

SEQ ID NO: 4722 - RNA, 20 nt, synthetic construct
  source 1..20: mol_type = other RNA
ttgttcctatgaagtctgca

SEQ ID NO: 4723 - RNA, 20 nt, synthetic construct
  source 1..20: mol_type = other RNA
tttctgttcttttgcataag

SEQ ID NO: 4724 - RNA, 20 nt, synthetic construct
  source 1..20: mol_type = other RNA
ctttctgttcttttgcataa

SEQ ID NO: 4725 - RNA, 20 nt, synthetic construct
  source 1..20: mol_type = other RNA
gctttctgttcttttgcata

SEQ ID NO: 4726 - RNA, 20 nt, synthetic construct
  source 1..20: mol_type = other RNA
atgcaaaagaacagaaagct

SEQ ID NO: 4727 - RNA, 20 nt, synthetic construct
  source 1..20: mol_type = other RNA
ggcttcacaaagtttgacct

SEQ ID NO: 4728 - RNA, 20 nt, synthetic construct
  source 1..20: mol_type = other RNA
tttcccttccatttcttccg

SEQ ID NO: 4729 - RNA, 20 nt, synthetic construct
  source 1..20: mol_type = other RNA
aagtttgacctcggaagaaa

SEQ ID NO: 4730 - RNA, 20 nt, synthetic construct
  source 1..20: mol_type = other RNA
ttgacctcggaagaaatgga

SEQ ID NO: 4731 - RNA, 20 nt, synthetic construct
  source 1..20: mol_type = other RNA
tgacctcggaagaaatggaa

SEQ ID NO: 4732 - RNA, 20 nt, synthetic construct
  source 1..20: mol_type = other RNA
tcggaagaaatggaagggaa

SEQ ID NO: 4733 - RNA, 20 nt, synthetic construct
  source 1..20: mol_type = other RNA
cggaagaaatggaagggaaa

SEQ ID NO: 4734 - RNA, 20 nt, synthetic construct
  source 1..20: mol_type = other RNA
acgtttgtgagagtgacaaa

SEQ ID NO: 4735 - RNA, 20 nt, synthetic construct
  source 1..20: mol_type = other RNA
tacgtttgtgagagtgacaa

SEQ ID NO: 4736 - RNA, 20 nt, synthetic construct
  source 1..20: mol_type = other RNA
aagaagcaaactaataatga

SEQ ID NO: 4737 - RNA, 20 nt, synthetic construct
  source 1..20: mol_type = other RNA
ggtgagtataatatgtgtga

SEQ ID NO: 4738 - RNA, 20 nt, synthetic construct
  source 1..20: mol_type = other RNA
aaggcagcacagcttctaca

SEQ ID NO: 4739 - RNA, 20 nt, synthetic construct
  source 1..20: mol_type = other RNA
gctgaatgaacagaagttta

SEQ ID NO: 4740 - RNA, 20 nt, synthetic construct
  source 1..20: mol_type = other RNA
ggagcccttagcaatgggac

SEQ ID NO: 4741 - RNA, 20 nt, synthetic construct
  source 1..20: mol_type = other RNA
cacgcggagcccttagcaat

SEQ ID NO: 4742 - RNA, 20 nt, synthetic construct
  source 1..20: mol_type = other RNA
gattgccagtcccattgcta

SEQ ID NO: 4743 - RNA, 20 nt, synthetic construct
  source 1..20: mol_type = other RNA
tcacgcggagcccttagcaa

SEQ ID NO: 4744 - RNA, 20 nt, synthetic construct
  source 1..20: mol_type = other RNA
attgccagtcccattgctaa

SEQ ID NO: 4745 - RNA, 20 nt, synthetic construct
  source 1..20: mol_type = other RNA
attaggggagttaagtcacg

SEQ ID NO: 4746 - RNA, 20 nt, synthetic construct
  source 1..20: mol_type = other RNA
tggcaactcacaaggattag

SEQ ID NO: 4747 - RNA, 20 nt, synthetic construct
  source 1..20: mol_type = other RNA
ttggcaactcacaaggatta

SEQ ID NO: 4748 - RNA, 20 nt, synthetic construct
  source 1..20: mol_type = other RNA
attggcaactcacaaggatt

SEQ ID NO: 4749 - RNA, 20 nt, synthetic construct
  source 1..20: mol_type = other RNA
ataataattggcaactcaca

SEQ ID NO: 4750 - RNA, 20 nt, synthetic construct
  source 1..20: mol_type = other RNA
tataaaatgcgaataataat

SEQ ID NO: 4751 - RNA, 20 nt, synthetic construct
  source 1..20: mol_type = other RNA
ttattcgcattttatagata

SEQ ID NO: 4752 - RNA, 20 nt, synthetic construct
  source 1..20: mol_type = other RNA
ttttatagatatggaaactg

SEQ ID NO: 4753 - RNA, 20 nt, synthetic construct
  source 1..20: mol_type = other RNA
atggaaactgaggctccaag

SEQ ID NO: 4754 - RNA, 20 nt, synthetic construct
  source 1..20: mol_type = other RNA
agttcattttttaaaccact

SEQ ID NO: 4755 - RNA, 20 nt, synthetic construct
  source 1..20: mol_type = other RNA
tttaaaaaatgaacttgccc

SEQ ID NO: 4756 - RNA, 20 nt, synthetic construct
  source 1..20: mol_type = other RNA
ctaccaacacactgtaacct

SEQ ID NO: 4757 - RNA, 20 nt, synthetic construct
  source 1..20: mol_type = other RNA
cctaccaacacactgtaacc

SEQ ID NO: 4758 - RNA, 20 nt, synthetic construct
  source 1..20: mol_type = other RNA
ttgcccaggttacagtgtgt

SEQ ID NO: 4759 - RNA, 20 nt, synthetic construct
  source 1..20: mol_type = other RNA
ccaggttacagtgtgttggt

SEQ ID NO: 4760 - RNA, 20 nt, synthetic construct
  source 1..20: mol_type = other RNA
gttacagtgtgttggtaggt

SEQ ID NO: 4761 - RNA, 20 nt, synthetic construct
  source 1..20: mol_type = other RNA
ttacagtgtgttggtaggta

SEQ ID NO: 4762 - RNA, 20 nt, synthetic construct
  source 1..20: mol_type = other RNA
tacagtgtgttggtaggtag

SEQ ID NO: 4763 - RNA, 20 nt, synthetic construct
  source 1..20: mol_type = other RNA
aaggcaagtatcgtgagctt

SEQ ID NO: 4764 - RNA, 20 nt, synthetic construct
  source 1..20: mol_type = other RNA
ataaattgagaagggaaaga

SEQ ID NO: 4765 - RNA, 20 nt, synthetic construct
  source 1..20: mol_type = other RNA
tcagagaaataaattgagaa

SEQ ID NO: 4766 - RNA, 20 nt, synthetic construct
  source 1..20: mol_type = other RNA
gtcagagaaataaattgaga

SEQ ID NO: 4767 - RNA, 20 nt, synthetic construct
  source 1..20: mol_type = other RNA
ctctggatgacactgctgtg

SEQ ID NO: 4768 - RNA, 20 nt, synthetic construct
  source 1..20: mol_type = other RNA
atgagctctgcttcaaactc

SEQ ID NO: 4769 - RNA, 20 nt, synthetic construct
  source 1..20: mol_type = other RNA
aagcagagctcatcaataag

SEQ ID NO: 4770 - RNA, 20 nt, synthetic construct
  source 1..20: mol_type = other RNA
agcagagctcatcaataagt

SEQ ID NO: 4771 - RNA, 20 nt, synthetic construct
  source 1..20: mol_type = other RNA
gcagagctcatcaataagtg

SEQ ID NO: 4772 - RNA, 20 nt, synthetic construct
  source 1..20: mol_type = other RNA
cagagctcatcaataagtgg

SEQ ID NO: 4773 - RNA, 20 nt, synthetic construct
  source 1..20: mol_type = other RNA
agctcatcaataagtggggg

SEQ ID NO: 4774 - RNA, 20 nt, synthetic construct
  source 1..20: mol_type = other RNA
gctcatcaataagtgggggt

SEQ ID NO: 4775 - RNA, 20 nt, synthetic construct
  source 1..20: mol_type = other RNA
ggggtgggctaaatgtctcc

SEQ ID NO: 4776 - RNA, 20 nt, synthetic construct
  source 1..20: mol_type = other RNA
agggaccgcagggaggagcc

SEQ ID NO: 4777 - RNA, 20 nt, synthetic construct
  source 1..20: mol_type = other RNA
tgtctccaggctcctccctg

SEQ ID NO: 4778 - RNA, 20 nt, synthetic construct
  source 1..20: mol_type = other RNA
tggtgggagggaccgcaggg

SEQ ID NO: 4779 - RNA, 20 nt, synthetic construct
  source 1..20: mol_type = other RNA
ggatggtgggagggaccgca

SEQ ID NO: 4780 - RNA, 20 nt, synthetic construct
  source 1..20: mol_type = other RNA
gggatggtgggagggaccgc

SEQ ID NO: 4781 - RNA, 20 nt, synthetic construct
  source 1..20: mol_type = other RNA
acagatgggggatggtggga

SEQ ID NO: 4782 - RNA, 20 nt, synthetic construct
  source 1..20: mol_type = other RNA
cacagatgggggatggtggg

SEQ ID NO: 4783 - RNA, 20 nt, synthetic construct
  source 1..20: mol_type = other RNA
tatcacagatgggggatggt

SEQ ID NO: 4784 - RNA, 20 nt, synthetic construct
  source 1..20: mol_type = other RNA
gtatcacagatgggggatgg

SEQ ID NO: 4785 - RNA, 20 nt, synthetic construct
  source 1..20: mol_type = other RNA
gtggtatcacagatggggga

SEQ ID NO: 4786 - RNA, 20 nt, synthetic construct
  source 1..20: mol_type = other RNA
acaggtggtatcacagatgg

SEQ ID NO: 4787 - RNA, 20 nt, synthetic construct
  source 1..20: mol_type = other RNA
cacaggtggtatcacagatg

SEQ ID NO: 4788 - RNA, 20 nt, synthetic construct
  source 1..20: mol_type = other RNA
acacaggtggtatcacagat

SEQ ID NO: 4789 - RNA, 20 nt, synthetic construct
  source 1..20: mol_type = other RNA
gacacaggtggtatcacaga

SEQ ID NO: 4790 - RNA, 20 nt, synthetic construct
  source 1..20: mol_type = other RNA
ctcaagcatagagacacagg

SEQ ID NO: 4791 - RNA, 20 nt, synthetic construct
  source 1..20: mol_type = other RNA
gggctcaagcatagagacac

SEQ ID NO: 4792 - RNA, 20 nt, synthetic construct
  source 1..20: mol_type = other RNA
ctctatgcttgagcccagac

SEQ ID NO: 4793 - RNA, 20 nt, synthetic construct
  source 1..20: mol_type = other RNA
tgatcacccttgtcctgtct

SEQ ID NO: 4794 - RNA, 20 nt, synthetic construct
  source 1..20: mol_type = other RNA
atgatcacccttgtcctgtc

SEQ ID NO: 4795 - RNA, 20 nt, synthetic construct
  source 1..20: mol_type = other RNA
gcttgagcccagacaggaca

SEQ ID NO: 4796 - RNA, 20 nt, synthetic construct
  source 1..20: mol_type = other RNA
cttgagcccagacaggacaa

SEQ ID NO: 4797 - RNA, 20 nt, synthetic construct
  source 1..20: mol_type = other RNA
gacaagggtgatcatttcat

SEQ ID NO: 4798 - RNA, 20 nt, synthetic construct
  source 1..20: mol_type = other RNA
acaagggtgatcatttcatt

SEQ ID NO: 4799 - RNA, 20 nt, synthetic construct
  source 1..20: mol_type = other RNA
ttcattgggaacattttgac

SEQ ID NO: 4800 - RNA, 20 nt, synthetic construct
  source 1..20: mol_type = other RNA
tcattgggaacattttgact

SEQ ID NO: 4801 - RNA, 20 nt, synthetic construct
  source 1..20: mol_type = other RNA
cattgggaacattttgactg

SEQ ID NO: 4802 - RNA, 20 nt, synthetic construct
  source 1..20: mol_type = other RNA
attgggaacattttgactgg

SEQ ID NO: 4803 - RNA, 20 nt, synthetic construct
  source 1..20: mol_type = other RNA
ttgggaacattttgactggg

SEQ ID NO: 4804 - RNA, 20 nt, synthetic construct
  source 1..20: mol_type = other RNA
ggggggaaagagcaccagcc

SEQ ID NO: 4805 - RNA, 20 nt, synthetic construct
  source 1..20: mol_type = other RNA
gggggaaagagcaccagcct

SEQ ID NO: 4806 - RNA, 20 nt, synthetic construct
  source 1..20: mol_type = other RNA
ccctgccaagactcccaggc

SEQ ID NO: 4807 - RNA, 20 nt, synthetic construct
  source 1..20: mol_type = other RNA
ctccccctgccaagactccc

SEQ ID NO: 4808 - RNA, 20 nt, synthetic construct
  source 1..20: mol_type = other RNA
gagcaccagcctgggagtct

SEQ ID NO: 4809 - RNA, 20 nt, synthetic construct
  source 1..20: mol_type = other RNA
accagcctgggagtcttggc

SEQ ID NO: 4810 - RNA, 20 nt, synthetic construct
  source 1..20: mol_type = other RNA
ccagcctgggagtcttggca

SEQ ID NO: 4811 - RNA, 20 nt, synthetic construct
  source 1..20: mol_type = other RNA
cagcctgggagtcttggcag

SEQ ID NO: 4812 - RNA, 20 nt, synthetic construct
  source 1..20: mol_type = other RNA
agcctgggagtcttggcagg

SEQ ID NO: 4813 - RNA, 20 nt, synthetic construct
  source 1..20: mol_type = other RNA
gggagtcttggcagggggag

SEQ ID NO: 4814 - RNA, 20 nt, synthetic construct
  source 1..20: mol_type = other RNA
ggagtcttggcagggggagt

SEQ ID NO: 4815 - RNA, 20 nt, synthetic construct
  source 1..20: mol_type = other RNA
gagtcttggcagggggagtg

SEQ ID NO: 4816 - RNA, 20 nt, synthetic construct
  source 1..20: mol_type = other RNA
agtcttggcagggggagtgg

SEQ ID NO: 4817 - RNA, 20 nt, synthetic construct
  source 1..20: mol_type = other RNA
ggcagggggagtgggggaga

SEQ ID NO: 4818 - RNA, 20 nt, synthetic construct
  source 1..20: mol_type = other RNA
gcagggggagtgggggagaa

SEQ ID NO: 4819 - RNA, 20 nt, synthetic construct
  source 1..20: mol_type = other RNA
cagggggagtgggggagaag

SEQ ID NO: 4820 - RNA, 20 nt, synthetic construct
  source 1..20: mol_type = other RNA
gggagtgggggagaaggggc

SEQ ID NO: 4821 - RNA, 20 nt, synthetic construct
  source 1..20: mol_type = other RNA
ggagtgggggagaaggggca

SEQ ID NO: 4822 - RNA, 20 nt, synthetic construct
  source 1..20: mol_type = other RNA
gagtgggggagaaggggcag

SEQ ID NO: 4823 - RNA, 20 nt, synthetic construct
  source 1..20: mol_type = other RNA
gggcaggggcagccaccgac

SEQ ID NO: 4824 - RNA, 20 nt, synthetic construct
  source 1..20: mol_type = other RNA
aagacctcatagcctgtcgg

SEQ ID NO: 4825 - RNA, 20 nt, synthetic construct
  source 1..20: mol_type = other RNA
cacaagacctcatagcctgt

SEQ ID NO: 4826 - RNA, 20 nt, synthetic construct
  source 1..20: mol_type = other RNA
gcagccaccgacaggctatg

SEQ ID NO: 4827 - RNA, 20 nt, synthetic construct
  source 1..20: mol_type = other RNA
tgtgcaagtcacgtccttcc

SEQ ID NO: 4828 - RNA, 20 nt, synthetic construct
  source 1..20: mol_type = other RNA
gtgcaagtcacgtccttccc

SEQ ID NO: 4829 - RNA, 20 nt, synthetic construct
  source 1..20: mol_type = other RNA
tgcaagtcacgtccttcccg

SEQ ID NO: 4830 - RNA, 20 nt, synthetic construct
  source 1..20: mol_type = other RNA
acaagactgagaccccggga

SEQ ID NO: 4831 - RNA, 20 nt, synthetic construct
  source 1..20: mol_type = other RNA
gatgacaagactgagacccc

SEQ ID NO: 4832 - RNA, 20 nt, synthetic construct
  source 1..20: mol_type = other RNA
agatgacaagactgagaccc

SEQ ID NO: 4833 - RNA, 20 nt, synthetic construct
  source 1..20: mol_type = other RNA
tcttgtcatctgcagagtga

SEQ ID NO: 4834 - RNA, 20 nt, synthetic construct
  source 1..20: mol_type = other RNA
atctgcagagtgaaggaaag

SEQ ID NO: 4835 - RNA, 20 nt, synthetic construct
  source 1..20: mol_type = other RNA
aggaaagaggtcaagcttga

SEQ ID NO: 4836 - RNA, 20 nt, synthetic construct
  source 1..20: mol_type = other RNA
aggtcaagcttgaaggtccc

SEQ ID NO: 4837 - RNA, 20 nt, synthetic construct
  source 1..20: mol_type = other RNA
acagggcattgggtctgcca

SEQ ID NO: 4838 - RNA, 20 nt, synthetic construct
  source 1..20: mol_type = other RNA
cacagggcattgggtctgcc

SEQ ID NO: 4839 - RNA, 20 nt, synthetic construct
  source 1..20: mol_type = other RNA
cagttttctcacagggcatt

SEQ ID NO: 4840 - RNA, 20 nt, synthetic construct
  source 1..20: mol_type = other RNA
tcagttttctcacagggcat

SEQ ID NO: 4841 - RNA, 20 nt, synthetic construct
  source 1..20: mol_type = other RNA
ccaaactcagttttctcaca

SEQ ID NO: 4842 - RNA, 20 nt, synthetic construct
  source 1..20: mol_type = other RNA
cccaaactcagttttctcac

SEQ ID NO: 4843 - RNA, 20 nt, synthetic construct
  source 1..20: mol_type = other RNA
ccctgtgagaaaactgagtt

SEQ ID NO: 4844 - RNA, 20 nt, synthetic construct
  source 1..20: mol_type = other RNA
cctgtgagaaaactgagttt

SEQ ID NO: 4845 - RNA, 20 nt, synthetic construct
  source 1..20: mol_type = other RNA
aacttattattttatagata

SEQ ID NO: 4846 - RNA, 20 nt, synthetic construct
  source 1..20: mol_type = other RNA
ttatagaaatgttatagata

SEQ ID NO: 4847 - RNA, 20 nt, synthetic construct
  source 1..20: mol_type = other RNA
atggaatcattttatagata

SEQ ID NO: 4848 - RNA, 20 nt, synthetic construct
  source 1..20: mol_type = other RNA
gttgtgtgactttggacttt

SEQ ID NO: 4849 - RNA, 20 nt, synthetic construct
  source 1..20: mol_type = other RNA
agttgtgtgactttggactt

SEQ ID NO: 4850 - RNA, 20 nt, synthetic construct
  source 1..20: mol_type = other RNA
gtgaatgagttgtgtgactt

SEQ ID NO: 4851 - RNA, 20 nt, synthetic construct
  source 1..20: mol_type = other RNA
aaagtcacacaactcattca

SEQ ID NO: 4852 - RNA, 20 nt, synthetic construct
  source 1..20: mol_type = other RNA
aactcattcacggagttgct

SEQ ID NO: 4853 - RNA, 20 nt, synthetic construct
  source 1..20: mol_type = other RNA
cggagttgctaggatcagtc

SEQ ID NO: 4854 - RNA, 20 nt, synthetic construct
  source 1..20: mol_type = other RNA
gagatcacactgcctcaaag

SEQ ID NO: 4855 - RNA, 20 nt, synthetic construct
  source 1..20: mol_type = other RNA
agcaatctgcctcctctttg

SEQ ID NO: 4856 - RNA, 20 nt, synthetic construct
  source 1..20: mol_type = other RNA
atcacactgcctcaaagagg

SEQ ID NO: 4857 - RNA, 20 nt, synthetic construct
  source 1..20: mol_type = other RNA
gaggcagattgctgcaatgt

SEQ ID NO: 4858 - RNA, 20 nt, synthetic construct
  source 1..20: mol_type = other RNA
taggttcttaataaagagca

SEQ ID NO: 4859 - RNA, 20 nt, synthetic construct
  source 1..20: mol_type = other RNA
aggttcttaataaagagcat

SEQ ID NO: 4860 - RNA, 20 nt, synthetic construct
  source 1..20: mol_type = other RNA
ttcttaataaagagcatggg

SEQ ID NO: 4861 - RNA, 20 nt, synthetic construct
  source 1..20: mol_type = other RNA
aataaagagcatgggtggaa

SEQ ID NO: 4862 - RNA, 20 nt, synthetic construct
  source 1..20: mol_type = other RNA
ataaagagcatgggtggaat

SEQ ID NO: 4863 - RNA, 20 nt, synthetic construct
  source 1..20: mol_type = other RNA
aagagcatgggtggaatggg

SEQ ID NO: 4864 - RNA, 20 nt, synthetic construct
  source 1..20: mol_type = other RNA
agcatgggtggaatgggagg

SEQ ID NO: 4865 - RNA, 20 nt, synthetic construct
  source 1..20: mol_type = other RNA
gcatgggtggaatgggaggc

SEQ ID NO: 4866 - RNA, 20 nt, synthetic construct
  source 1..20: mol_type = other RNA
tggaatgggaggcgggcatc

SEQ ID NO: 4867 - RNA, 20 nt, synthetic construct
  source 1..20: mol_type = other RNA
atgggaggcgggcatcaggc

SEQ ID NO: 4868 - RNA, 20 nt, synthetic construct
  source 1..20: mol_type = other RNA
ggcgggcatcaggcaggagc

SEQ ID NO: 4869 - RNA, 20 nt, synthetic construct
  source 1..20: mol_type = other RNA
gcgggcatcaggcaggagct

SEQ ID NO: 4870 - RNA, 20 nt, synthetic construct
  source 1..20: mol_type = other RNA
cgggcatcaggcaggagctg

SEQ ID NO: 4871 - RNA, 20 nt, synthetic construct
  source 1..20: mol_type = other RNA
tcaggcaggagctggggcaa

SEQ ID NO: 4872 - RNA, 20 nt, synthetic construct
  source 1..20: mol_type = other RNA
agccccttggtcagggacac

SEQ ID NO: 4873 - RNA, 20 nt, synthetic construct
  source 1..20: mol_type = other RNA
tgtgcctgtgtccctgacca

SEQ ID NO: 4874 - RNA, 20 nt, synthetic construct
  source 1..20: mol_type = other RNA
ctctcccagccccttggtca

SEQ ID NO: 4875 - RNA, 20 nt, synthetic construct
  source 1..20: mol_type = other RNA
gtgcctgtgtccctgaccaa

SEQ ID NO: 4876 - RNA, 20 nt, synthetic construct
  source 1..20: mol_type = other RNA
cctctcccagccccttggtc

SEQ ID NO: 4877 - RNA, 20 nt, synthetic construct
  source 1..20: mol_type = other RNA
tgcctgtgtccctgaccaag

SEQ ID NO: 4878 - RNA, 20 nt, synthetic construct
  source 1..20: mol_type = other RNA
tgtgtccctgaccaaggggc

SEQ ID NO: 4879 - RNA, 20 nt, synthetic construct
  source 1..20: mol_type = other RNA
ctccacctctcccagcccct

SEQ ID NO: 4880 - RNA, 20 nt, synthetic construct
  source 1..20: mol_type = other RNA
gtgtccctgaccaaggggct

SEQ ID NO: 4881 - RNA, 20 nt, synthetic construct
  source 1..20: mol_type = other RNA
cctgaccaaggggctgggag

SEQ ID NO: 4882 - RNA, 20 nt, synthetic construct
  source 1..20: mol_type = other RNA
gaccaaggggctgggagagg

SEQ ID NO: 4883 - RNA, 20 nt, synthetic construct
  source 1..20: mol_type = other RNA
caaagctgggagatggttgg

SEQ ID NO: 4884 - RNA, 20 nt, synthetic construct
  source 1..20: mol_type = other RNA
ccaaagctgggagatggttg

SEQ ID NO: 4885 - RNA, 20 nt, synthetic construct
  source 1..20: mol_type = other RNA
gccaaagctgggagatggtt

SEQ ID NO: 4886 - RNA, 20 nt, synthetic construct
  source 1..20: mol_type = other RNA
ggccaaagctgggagatggt

SEQ ID NO: 4887 - RNA, 20 nt, synthetic construct
  source 1..20: mol_type = other RNA
gcagggccaaagctgggaga

SEQ ID NO: 4888 - RNA, 20 nt, synthetic construct
  source 1..20: mol_type = other RNA
ccccaaccatctcccagctt

SEQ ID NO: 4889 - RNA, 20 nt, synthetic construct
  source 1..20: mol_type = other RNA
cctggagcagggccaaagct

SEQ ID NO: 4890 - RNA, 20 nt, synthetic construct
  source 1..20: mol_type = other RNA
tcctggagcagggccaaagc

SEQ ID NO: 4891 - RNA, 20 nt, synthetic construct
  source 1..20: mol_type = other RNA
cccagctttggccctgctcc

SEQ ID NO: 4892 - RNA, 20 nt, synthetic construct
  source 1..20: mol_type = other RNA
accgcccttttcctggagca

SEQ ID NO: 4893 - RNA, 20 nt, synthetic construct
  source 1..20: mol_type = other RNA
caccgcccttttcctggagc

SEQ ID NO: 4894 - RNA, 20 nt, synthetic construct
  source 1..20: mol_type = other RNA
tttggccctgctccaggaaa

SEQ ID NO: 4895 - RNA, 20 nt, synthetic construct
  source 1..20: mol_type = other RNA
ttggccctgctccaggaaaa

SEQ ID NO: 4896 - RNA, 20 nt, synthetic construct
  source 1..20: mol_type = other RNA
tggggccaccgcccttttcc

SEQ ID NO: 4897 - RNA, 20 nt, synthetic construct
  source 1..20: mol_type = other RNA
gccctgctccaggaaaaggg

SEQ ID NO: 4898 - RNA, 20 nt, synthetic construct
  source 1..20: mol_type = other RNA
ctgctccaggaaaagggcgg

SEQ ID NO: 4899 - RNA, 20 nt, synthetic construct
  source 1..20: mol_type = other RNA
ggaagcagaactgaaagatg

SEQ ID NO: 4900 - RNA, 20 nt, synthetic construct
  source 1..20: mol_type = other RNA
aggaagcagaactgaaagat

SEQ ID NO: 4901 - RNA, 20 nt, synthetic construct
  source 1..20: mol_type = other RNA
gaggaagcagaactgaaaga

SEQ ID NO: 4902 - RNA, 20 nt, synthetic construct
  source 1..20: mol_type = other RNA
tcccagccaaccatgactag

SEQ ID NO: 4903 - RNA, 20 nt, synthetic construct
  source 1..20: mol_type = other RNA
agttctgcttcctctagtca

SEQ ID NO: 4904 - RNA, 20 nt, synthetic construct
  source 1..20: mol_type = other RNA
ctgcttcctctagtcatggt

SEQ ID NO: 4905 - RNA, 20 nt, synthetic construct
  source 1..20: mol_type = other RNA
ttcctctagtcatggttggc

SEQ ID NO: 4906 - RNA, 20 nt, synthetic construct
  source 1..20: mol_type = other RNA
tcctctagtcatggttggct

SEQ ID NO: 4907 - RNA, 20 nt, synthetic construct
  source 1..20: mol_type = other RNA
gctgggatctcgctgcaagc

SEQ ID NO: 4908 - RNA, 20 nt, synthetic construct
  source 1..20: mol_type = other RNA
tgcaggaacccaaacataac

SEQ ID NO: 4909 - RNA, 20 nt, synthetic construct
  source 1..20: mol_type = other RNA
cgctgcaagccggttatgtt

SEQ ID NO: 4910 - RNA, 20 nt, synthetic construct
  source 1..20: mol_type = other RNA
gctgcaagccggttatgttt

SEQ ID NO: 4911 - RNA, 20 nt, synthetic construct
  source 1..20: mol_type = other RNA
gacggttgagcgggggctgc

SEQ ID NO: 4912 - RNA, 20 nt, synthetic construct
  source 1..20: mol_type = other RNA
tgttcatgacggttgagcgg

SEQ ID NO: 4913 - RNA, 20 nt, synthetic construct
  source 1..20: mol_type = other RNA
ttgttcatgacggttgagcg

SEQ ID NO: 4914 - RNA, 20 nt, synthetic construct
  source 1..20: mol_type = other RNA
cttgttcatgacggttgagc

SEQ ID NO: 4915 - RNA, 20 nt, synthetic construct
  source 1..20: mol_type = other RNA
acttgttcatgacggttgag

SEQ ID NO: 4916 - RNA, 20 nt, synthetic construct
  source 1..20: mol_type = other RNA
ctgggcccacttgttcatga

SEQ ID NO: 4917 - RNA, 20 nt, synthetic construct
  source 1..20: mol_type = other RNA
gctcaaccgtcatgaacaag

SEQ ID NO: 4918 - RNA, 20 nt, synthetic construct
  source 1..20: mol_type = other RNA
ctcaaccgtcatgaacaagt

SEQ ID NO: 4919 - RNA, 20 nt, synthetic construct
  source 1..20: mol_type = other RNA
tccaagctggggcactggct

SEQ ID NO: 4920 - RNA, 20 nt, synthetic construct
  source 1..20: mol_type = other RNA
gtccaagctggggcactggc

SEQ ID NO: 4921 - RNA, 20 nt, synthetic construct
  source 1..20: mol_type = other RNA
tccagtccaagctggggcac

SEQ ID NO: 4922 - RNA, 20 nt, synthetic construct
  source 1..20: mol_type = other RNA
gcccagccagtgccccagct

SEQ ID NO: 4923 - RNA, 20 nt, synthetic construct
  source 1..20: mol_type = other RNA
gatctttccagtccaagctg

SEQ ID NO: 4924 - RNA, 20 nt, synthetic construct
  source 1..20: mol_type = other RNA
tgatctttccagtccaagct

SEQ ID NO: 4925 - RNA, 20 nt, synthetic construct
  source 1..20: mol_type = other RNA
atgatctttccagtccaagc

SEQ ID NO: 4926 - RNA, 20 nt, synthetic construct
  source 1..20: mol_type = other RNA
gccagtgccccagcttggac

SEQ ID NO: 4927 - RNA, 20 nt, synthetic construct
  source 1..20: mol_type = other RNA
agatcattctctgtgacatc

SEQ ID NO: 4928 - RNA, 20 nt, synthetic construct
  source 1..20: mol_type = other RNA
gatcattctctgtgacatcc

SEQ ID NO: 4929 - RNA, 20 nt, synthetic construct
  source 1..20: mol_type = other RNA
atcattctctgtgacatccg

SEQ ID NO: 4930 - RNA, 20 nt, synthetic construct
  source 1..20: mol_type = other RNA
tcattctctgtgacatccgg

SEQ ID NO: 4931 - RNA, 20 nt, synthetic construct
  source 1..20: mol_type = other RNA
agaggctcagcacagacccc

SEQ ID NO: 4932 - RNA, 20 nt, synthetic construct
  source 1..20: mol_type = other RNA
tctgtgctgagcctctcccc

SEQ ID NO: 4933 - RNA, 20 nt, synthetic construct
  source 1..20: mol_type = other RNA
agctttcactgcctggggag

SEQ ID NO: 4934 - RNA, 20 nt, synthetic construct
  source 1..20: mol_type = other RNA
tccacagctttcactgcctg

SEQ ID NO: 4935 - RNA, 20 nt, synthetic construct
  source 1..20: mol_type = other RNA
atccacagctttcactgcct

SEQ ID NO: 4936 - RNA, 20 nt, synthetic construct
  source 1..20: mol_type = other RNA
catccacagctttcactgcc

SEQ ID NO: 4937 - RNA, 20 nt, synthetic construct
  source 1..20: mol_type = other RNA
tccccaggcagtgaaagctg

SEQ ID NO: 4938 - RNA, 20 nt, synthetic construct
  source 1..20: mol_type = other RNA
tgtggatgcgtgaaagaaaa

SEQ ID NO: 4939 - RNA, 20 nt, synthetic construct
  source 1..20: mol_type = other RNA
gtggatgcgtgaaagaaaat

SEQ ID NO: 4940 - RNA, 20 nt, synthetic construct
  source 1..20: mol_type = other RNA
cgtgaaagaaaatgggtctc

SEQ ID NO: 4941 - RNA, 20 nt, synthetic construct
  source 1..20: mol_type = other RNA
gtgaaagaaaatgggtctct

SEQ ID NO: 4942 - RNA, 20 nt, synthetic construct
  source 1..20: mol_type = other RNA
aagaaaatgggtctctgggc

SEQ ID NO: 4943 - RNA, 20 nt, synthetic construct
  source 1..20: mol_type = other RNA
agaaaatgggtctctgggcc

SEQ ID NO: 4944 - RNA, 20 nt, synthetic construct
  source 1..20: mol_type = other RNA
atgggtctctgggccgggtg

SEQ ID NO: 4945 - RNA, 20 nt, synthetic construct
  source 1..20: mol_type = other RNA
caggtgtgagccaccacacc

SEQ ID NO: 4946 - RNA, 20 nt, synthetic construct
  source 1..20: mol_type = other RNA
ggtctctgggccgggtgtgg

SEQ ID NO: 4947 - RNA, 20 nt, synthetic construct
  source 1..20: mol_type = other RNA
tcccaaagtgctgggattac

SEQ ID NO: 4948 - RNA, 20 nt, synthetic construct
  source 1..20: mol_type = other RNA
ccttggcctcccaaagtgct

SEQ ID NO: 4949 - RNA, 20 nt, synthetic construct
  source 1..20: mol_type = other RNA
cacctgtaatcccagcactt

SEQ ID NO: 4950 - RNA, 20 nt, synthetic construct
  source 1..20: mol_type = other RNA
gccttggcctcccaaagtgc

SEQ ID NO: 4951 - RNA, 20 nt, synthetic construct
  source 1..20: mol_type = other RNA
acctgtaatcccagcacttt

SEQ ID NO: 4952 - RNA, 20 nt, synthetic construct
  source 1..20: mol_type = other RNA
tgtaatcccagcactttggg

SEQ ID NO: 4953 - RNA, 20 nt, synthetic construct
  source 1..20: mol_type = other RNA
cccagcactttgggaggcca

SEQ ID NO: 4954 - RNA, 20 nt, synthetic construct
  source 1..20: mol_type = other RNA
agcactttgggaggccaagg

SEQ ID NO: 4955 - RNA, 20 nt, synthetic construct
  source 1..20: mol_type = other RNA
gcactttgggaggccaaggc

SEQ ID NO: 4956 - RNA, 20 nt, synthetic construct
  source 1..20: mol_type = other RNA
ctcaggtgatccacccgcct

SEQ ID NO: 4957 - RNA, 20 nt, synthetic construct
  source 1..20: mol_type = other RNA
ctttgggaggccaaggcggg

SEQ ID NO: 4958 - RNA, 20 nt, synthetic construct
  source 1..20: mol_type = other RNA
caaggcgggtggatcacctg

SEQ ID NO: 4959 - RNA, 20 nt, synthetic construct
  source 1..20: mol_type = other RNA
gcgggtggatcacctgaggt

SEQ ID NO: 4960 - RNA, 20 nt, synthetic construct
  source 1..20: mol_type = other RNA
cgggtggatcacctgaggtc

SEQ ID NO: 4961 - RNA, 20 nt, synthetic construct
  source 1..20: mol_type = other RNA
ggtttcgaactcccgacctc

SEQ ID NO: 4962 - RNA, 20 nt, synthetic construct
  source 1..20: mol_type = other RNA
tttcaccatgttggtcaggc

SEQ ID NO: 4963 - RNA, 20 nt, synthetic construct
  source 1..20: mol_type = other RNA
ggggtttcaccatgttggtc

SEQ ID NO: 4964 - RNA, 20 nt, synthetic construct
  source 1..20: mol_type = other RNA
cgaaaccagcctgaccaaca

SEQ ID NO: 4965 - RNA, 20 nt, synthetic construct
  source 1..20: mol_type = other RNA
aagatggggtttcaccatgt

SEQ ID NO: 4966 - RNA, 20 nt, synthetic construct
  source 1..20: mol_type = other RNA
ttttatttttagtaaagatg

SEQ ID NO: 4967 - RNA, 20 nt, synthetic construct
  source 1..20: mol_type = other RNA
tttttatttttagtaaagat

SEQ ID NO: 4968 - RNA, 20 nt, synthetic construct
  source 1..20: mol_type = other RNA
ttttttatttttagtaaaga

SEQ ID NO: 4969 - RNA, 20 nt, synthetic construct
  source 1..20: mol_type = other RNA
taaaaataaaaaaattagcc

SEQ ID NO: 4970 - RNA, 20 nt, synthetic construct
  source 1..20: mol_type = other RNA
ataaaaaaattagccaggca

SEQ ID NO: 4971 - RNA, 20 nt, synthetic construct
  source 1..20: mol_type = other RNA
caggcacccgccaccatgcc

SEQ ID NO: 4972 - RNA, 20 nt, synthetic construct
  source 1..20: mol_type = other RNA
aaaaaattagccaggcatgg

SEQ ID NO: 4973 - RNA, 20 nt, synthetic construct
  source 1..20: mol_type = other RNA
aaattagccaggcatggtgg

SEQ ID NO: 4974 - RNA, 20 nt, synthetic construct
  source 1..20: mol_type = other RNA
aattagccaggcatggtggc

SEQ ID NO: 4975 - RNA, 20 nt, synthetic construct
  source 1..20: mol_type = other RNA
tcccaagtagctggcattac

SEQ ID NO: 4976 - RNA, 20 nt, synthetic construct
  source 1..20: mol_type = other RNA
tgcctgtaatgccagctact

SEQ ID NO: 4977 - RNA, 20 nt, synthetic construct
  source 1..20: mol_type = other RNA
gcttcaacctcccaagtagc

SEQ ID NO: 4978 - RNA, 20 nt, synthetic construct
  source 1..20: mol_type = other RNA
gcctgtaatgccagctactt

SEQ ID NO: 4979 - RNA, 20 nt, synthetic construct
  source 1..20: mol_type = other RNA
tgtaatgccagctacttggg

SEQ ID NO: 4980 - RNA, 20 nt, synthetic construct
  source 1..20: mol_type = other RNA
gctacttgggaggttgaagc

SEQ ID NO: 4981 - RNA, 20 nt, synthetic construct
  source 1..20: mol_type = other RNA
gcaggagaattgcttgaatc

SEQ ID NO: 4982 - RNA, 20 nt, synthetic construct
  source 1..20: mol_type = other RNA
caggagaattgcttgaatcc

SEQ ID NO: 4983 - RNA, 20 nt, synthetic construct
  source 1..20: mol_type = other RNA
gagaattgcttgaatccggg

SEQ ID NO: 4984 - RNA, 20 nt, synthetic construct
  source 1..20: mol_type = other RNA
tcactgcaacctctgcctcc

SEQ ID NO: 4985 - RNA, 20 nt, synthetic construct
  source 1..20: mol_type = other RNA
tgcttgaatccgggaggcag

SEQ ID NO: 4986 - RNA, 20 nt, synthetic construct
  source 1..20: mol_type = other RNA
ggagtgcagtggtgcaatct

SEQ ID NO: 4987 - RNA, 20 nt, synthetic construct
  source 1..20: mol_type = other RNA
tcgcccaggctggagtgcag

SEQ ID NO: 4988 - RNA, 20 nt, synthetic construct
  source 1..20: mol_type = other RNA
tgcaccactgcactccagcc

SEQ ID NO: 4989 - RNA, 20 nt, synthetic construct
  source 1..20: mol_type = other RNA
gcaccactgcactccagcct

SEQ ID NO: 4990 - RNA, 20 nt, synthetic construct
  source 1..20: mol_type = other RNA
tctcactctgtcgcccaggc

SEQ ID NO: 4991 - RNA, 20 nt, synthetic construct
  source 1..20: mol_type = other RNA
agagtctcactctgtcgccc

SEQ ID NO: 4992 - RNA, 20 nt, synthetic construct
  source 1..20: mol_type = other RNA
agaaaaagaaaatgagtctc

SEQ ID NO: 4993 - RNA, 20 nt, synthetic construct
  source 1..20: mol_type = other RNA
aagaaaatgagtctcaggaa

SEQ ID NO: 4994 - RNA, 20 nt, synthetic construct
  source 1..20: mol_type = other RNA
agaaaatgagtctcaggaat

SEQ ID NO: 4995 - RNA, 20 nt, synthetic construct
  source 1..20: mol_type = other RNA
gaaaatgagtctcaggaatg

SEQ ID NO: 4996 - RNA, 20 nt, synthetic construct
  source 1..20: mol_type = other RNA
aatgagtctcaggaatgggg

SEQ ID NO: 4997 - RNA, 20 nt, synthetic construct
  source 1..20: mol_type = other RNA
ctcttcaatgtattctcttc

SEQ ID NO: 4998 - RNA, 20 nt, synthetic construct
  source 1..20: mol_type = other RNA
tcttcaatgtattctcttct

SEQ ID NO: 4999 - RNA, 20 nt, synthetic construct
  source 1..20: mol_type = other RNA
ttctcttctgggcccagaac

SEQ ID NO: 5000 - RNA, 20 nt, synthetic construct
  source 1..20: mol_type = other RNA
tctcttctgggcccagaaca

SEQ ID NO: 5001 - RNA, 20 nt, synthetic construct
  source 1..20: mol_type = other RNA
ggctcctactgccctgttct

SEQ ID NO: 5002 - RNA, 20 nt, synthetic construct
  source 1..20: mol_type = other RNA
aggctcctactgccctgttc

SEQ ID NO: 5003 - RNA, 20 nt, synthetic construct
  source 1..20: mol_type = other RNA
tgggcccagaacagggcagt

SEQ ID NO: 5004 - RNA, 20 nt, synthetic construct
  source 1..20: mol_type = other RNA
gggcagtaggagcctccctc

SEQ ID NO: 5005 - RNA, 20 nt, synthetic construct
  source 1..20: mol_type = other RNA
gaagctggaagaccagaggg

SEQ ID NO: 5006 - RNA, 20 nt, synthetic construct
  source 1..20: mol_type = other RNA
cctgaagctggaagaccaga

SEQ ID NO: 5007 - RNA, 20 nt, synthetic construct
  source 1..20: mol_type = other RNA
ccctgaagctggaagaccag

SEQ ID NO: 5008 - RNA, 20 nt, synthetic construct
  source 1..20: mol_type = other RNA
ccctctggtcttccagcttc

SEQ ID NO: 5009 - RNA, 20 nt, synthetic construct
  source 1..20: mol_type = other RNA
cctctggtcttccagcttca

SEQ ID NO: 5010 - RNA, 20 nt, synthetic construct
  source 1..20: mol_type = other RNA
aggagagctggccctgaagc

SEQ ID NO: 5011 - RNA, 20 nt, synthetic construct
  source 1..20: mol_type = other RNA
ggaggaggtaagaggagagc

SEQ ID NO: 5012 - RNA, 20 nt, synthetic construct
  source 1..20: mol_type = other RNA
agcttcctggaggaggtaag

SEQ ID NO: 5013 - RNA, 20 nt, synthetic construct
  source 1..20: mol_type = other RNA
gctctcctcttacctcctcc

SEQ ID NO: 5014 - RNA, 20 nt, synthetic construct
  source 1..20: mol_type = other RNA
cagagggagcttcctggagg

SEQ ID NO: 5015 - RNA, 20 nt, synthetic construct
  source 1..20: mol_type = other RNA
aaacagagggagcttcctgg

SEQ ID NO: 5016 - RNA, 20 nt, synthetic construct
  source 1..20: mol_type = other RNA
aagaaacagagggagcttcc

SEQ ID NO: 5017 - RNA, 20 nt, synthetic construct
  source 1..20: mol_type = other RNA
gaaggctggaaagaaacaga

SEQ ID NO: 5018 - RNA, 20 nt, synthetic construct
  source 1..20: mol_type = other RNA
tgaaggctggaaagaaacag

SEQ ID NO: 5019 - RNA, 20 nt, synthetic construct
  source 1..20: mol_type = other RNA
catgacatgcagatgaaggc

SEQ ID NO: 5020 - RNA, 20 nt, synthetic construct
  source 1..20: mol_type = other RNA
cacacatgacatgcagatga

SEQ ID NO: 5021 - RNA, 20 nt, synthetic construct
  source 1..20: mol_type = other RNA
cttcatctgcatgtcatgtg

SEQ ID NO: 5022 - RNA, 20 nt, synthetic construct
  source 1..20: mol_type = other RNA
catctgcatgtcatgtgtgg

SEQ ID NO: 5023 - RNA, 20 nt, synthetic construct
  source 1..20: mol_type = other RNA
atctgcatgtcatgtgtggt

SEQ ID NO: 5024 - RNA, 20 nt, synthetic construct
  source 1..20: mol_type = other RNA
gtcatgtgtggtgggttgaa

SEQ ID NO: 5025 - RNA, 20 nt, synthetic construct
  source 1..20: mol_type = other RNA
atgtgtggtgggttgaaagg

SEQ ID NO: 5026 - RNA, 20 nt, synthetic construct
  source 1..20: mol_type = other RNA
acatggacatatcttttggg

SEQ ID NO: 5027 - RNA, 20 nt, synthetic construct
  source 1..20: mol_type = other RNA
gacatggacatatcttttgg

SEQ ID NO: 5028 - RNA, 20 nt, synthetic construct
  source 1..20: mol_type = other RNA
tgacatggacatatcttttg

SEQ ID NO: 5029 - RNA, 20 nt, synthetic construct
  source 1..20: mol_type = other RNA
ttgacatggacatatctttt

SEQ ID NO: 5030 - RNA, 20 nt, synthetic construct
  source 1..20: mol_type = other RNA
tttgacatggacatatcttt

SEQ ID NO: 5031 - RNA, 20 nt, synthetic construct
  source 1..20: mol_type = other RNA
caggttccagggatttgaca

SEQ ID NO: 5032 - RNA, 20 nt, synthetic construct
  source 1..20: mol_type = other RNA
atatgtccatgtcaaatccc

SEQ ID NO: 5033 - RNA, 20 nt, synthetic construct
  source 1..20: mol_type = other RNA
agtcacactgacaggttcca

SEQ ID NO: 5034 - RNA, 20 nt, synthetic construct
  source 1..20: mol_type = other RNA
aagtcacactgacaggttcc

SEQ ID NO: 5035 - RNA, 20 nt, synthetic construct
  source 1..20: mol_type = other RNA
ccaaataaagtcacactgac

SEQ ID NO: 5036 - RNA, 20 nt, synthetic construct
  source 1..20: mol_type = other RNA
cctgtcagtgtgactttatt

SEQ ID NO: 5037 - RNA, 20 nt, synthetic construct
  source 1..20: mol_type = other RNA
ctgtcagtgtgactttattt

SEQ ID NO: 5038 - RNA, 20 nt, synthetic construct
  source 1..20: mol_type = other RNA
gtgtgactttatttgggaaa

SEQ ID NO: 5039 - RNA, 20 nt, synthetic construct
  source 1..20: mol_type = other RNA
tgtgactttatttgggaaaa

SEQ ID NO: 5040 - RNA, 20 nt, synthetic construct
  source 1..20: mol_type = other RNA
ttgcagatagaattaagtta

SEQ ID NO: 5041 - RNA, 20 nt, synthetic construct
  source 1..20: mol_type = other RNA
tgcagatagaattaagttaa

SEQ ID NO: 5042 - RNA, 20 nt, synthetic construct
  source 1..20: mol_type = other RNA
gcagatagaattaagttaag

SEQ ID NO: 5043 - RNA, 20 nt, synthetic construct
  source 1..20: mol_type = other RNA
atagaattaagttaaggggc

SEQ ID NO: 5044 - RNA, 20 nt, synthetic construct
  source 1..20: mol_type = other RNA
tagaattaagttaaggggct

SEQ ID NO: 5045 - RNA, 20 nt, synthetic construct
  source 1..20: mol_type = other RNA
agttaaggggctgggtgcag

SEQ ID NO: 5046 - RNA, 20 nt, synthetic construct
  source 1..20: mol_type = other RNA
tcccaaagtgctgggattac

SEQ ID NO: 5047 - RNA, 20 nt, synthetic construct
  source 1..20: mol_type = other RNA
tctcagcttcccaaagtgct

SEQ ID NO: 5048 - RNA, 20 nt, synthetic construct
  source 1..20: mol_type = other RNA
tgcctgtaatcccagcactt

SEQ ID NO: 5049 - RNA, 20 nt, synthetic construct
  source 1..20: mol_type = other RNA
atctcagcttcccaaagtgc

SEQ ID NO: 5050 - RNA, 20 nt, synthetic construct
  source 1..20: mol_type = other RNA
gcctgtaatcccagcacttt

SEQ ID NO: 5051 - RNA, 20 nt, synthetic construct
  source 1..20: mol_type = other RNA
gcactttgggaagctgagat

SEQ ID NO: 5052 - RNA, 20 nt, synthetic construct
  source 1..20: mol_type = other RNA
ctttgggaagctgagattgg

SEQ ID NO: 5053 - RNA, 20 nt, synthetic construct
  source 1..20: mol_type = other RNA
tgagattggaggatcacctg

SEQ ID NO: 5054 - RNA, 20 nt, synthetic construct
  source 1..20: mol_type = other RNA
ttggaggatcacctgaggtc

SEQ ID NO: 5055 - RNA, 20 nt, synthetic construct
  source 1..20: mol_type = other RNA
ggtcttgaactcctgacctc

SEQ ID NO: 5056 - RNA, 20 nt, synthetic construct
  source 1..20: mol_type = other RNA
tcaggagttcaagaccagcg

SEQ ID NO: 5057 - RNA, 20 nt, synthetic construct
  source 1..20: mol_type = other RNA
ttttgccatgttggccacgc

SEQ ID NO: 5058 - RNA, 20 nt, synthetic construct
  source 1..20: mol_type = other RNA
caagaccagcgtggccaaca

SEQ ID NO: 5059 - RNA, 20 nt, synthetic construct
  source 1..20: mol_type = other RNA
gaaatggggttttgccatgt

SEQ ID NO: 5060 - RNA, 20 nt, synthetic construct
  source 1..20: mol_type = other RNA
ttgtatttttagtagaaatg

SEQ ID NO: 5061 - RNA, 20 nt, synthetic construct
  source 1..20: mol_type = other RNA
tttgtatttttagtagaaat

SEQ ID NO: 5062 - RNA, 20 nt, synthetic construct
  source 1..20: mol_type = other RNA
ttttgtatttttagtagaaa

SEQ ID NO: 5063 - RNA, 20 nt, synthetic construct
  source 1..20: mol_type = other RNA
ctaaaaatacaaaaattagc

SEQ ID NO: 5064 - RNA, 20 nt, synthetic construct
  source 1..20: mol_type = other RNA
atacaaaaattagctggtca

SEQ ID NO: 5065 - RNA, 20 nt, synthetic construct
  source 1..20: mol_type = other RNA
caaaaattagctggtcatgg

SEQ ID NO: 5066 - RNA, 20 nt, synthetic construct
  source 1..20: mol_type = other RNA
tcctgagtagctgggattac

SEQ ID NO: 5067 - RNA, 20 nt, synthetic construct
  source 1..20: mol_type = other RNA
ccccagtctcctgagtagct

SEQ ID NO: 5068 - RNA, 20 nt, synthetic construct
  source 1..20: mol_type = other RNA
gccccagtctcctgagtagc

SEQ ID NO: 5069 - RNA, 20 nt, synthetic construct
  source 1..20: mol_type = other RNA
acctgtaatcccagctactc

SEQ ID NO: 5070 - RNA, 20 nt, synthetic construct
  source 1..20: mol_type = other RNA
atcccagctactcaggagac

SEQ ID NO: 5071 - RNA, 20 nt, synthetic construct
  source 1..20: mol_type = other RNA
tcccagctactcaggagact

SEQ ID NO: 5072 - RNA, 20 nt, synthetic construct
  source 1..20: mol_type = other RNA
cccagctactcaggagactg

SEQ ID NO: 5073 - RNA, 20 nt, synthetic construct
  source 1..20: mol_type = other RNA
gctactcaggagactggggc

SEQ ID NO: 5074 - RNA, 20 nt, synthetic construct
  source 1..20: mol_type = other RNA
ggcaggagaatcgcttgaac

SEQ ID NO: 5075 - RNA, 20 nt, synthetic construct
  source 1..20: mol_type = other RNA
gcaggagaatcgcttgaact

SEQ ID NO: 5076 - RNA, 20 nt, synthetic construct
  source 1..20: mol_type = other RNA
ggagaatcgcttgaactggg

SEQ ID NO: 5077 - RNA, 20 nt, synthetic construct
  source 1..20: mol_type = other RNA
gaatcgcttgaactgggagg

SEQ ID NO: 5078 - RNA, 20 nt, synthetic construct
  source 1..20: mol_type = other RNA
tcgcttgaactgggaggtgg

SEQ ID NO: 5079 - RNA, 20 nt, synthetic construct
  source 1..20: mol_type = other RNA
ggaatgcagtggcgctgtat

SEQ ID NO: 5080 - RNA, 20 nt, synthetic construct
  source 1..20: mol_type = other RNA
ttgcccaggctggaatgcag

SEQ ID NO: 5081 - RNA, 20 nt, synthetic construct
  source 1..20: mol_type = other RNA
agcgccactgcattccagcc

SEQ ID NO: 5082 - RNA, 20 nt, synthetic construct
  source 1..20: mol_type = other RNA
gcgccactgcattccagcct

SEQ ID NO: 5083 - RNA, 20 nt, synthetic construct
  source 1..20: mol_type = other RNA
gcttgctctgttgcccaggc

SEQ ID NO: 5084 - RNA, 20 nt, synthetic construct
  source 1..20: mol_type = other RNA
agaggcttgctctgttgccc

SEQ ID NO: 5085 - RNA, 20 nt, synthetic construct
  source 1..20: mol_type = other RNA
tttgccttcttttgagacag

SEQ ID NO: 5086 - RNA, 20 nt, synthetic construct
  source 1..20: mol_type = other RNA
caagcctctgtctcaaaaga

SEQ ID NO: 5087 - RNA, 20 nt, synthetic construct
  source 1..20: mol_type = other RNA
atcttgaaatgacatcatcc

SEQ ID NO: 5088 - RNA, 20 nt, synthetic construct
  source 1..20: mol_type = other RNA
aggacccacctagataatcc

SEQ ID NO: 5089 - RNA, 20 nt, synthetic construct
  source 1..20: mol_type = other RNA
gacatcatcctggattatct

SEQ ID NO: 5090 - RNA, 20 nt, synthetic construct
  source 1..20: mol_type = other RNA
atcatcctggattatctagg

SEQ ID NO: 5091 - RNA, 20 nt, synthetic construct
  source 1..20: mol_type = other RNA
tcatcctggattatctaggt

SEQ ID NO: 5092 - RNA, 20 nt, synthetic construct
  source 1..20: mol_type = other RNA
agacacttgtcattggattt

SEQ ID NO: 5093 - RNA, 20 nt, synthetic construct
  source 1..20: mol_type = other RNA
cttataaagacacttgtcat

SEQ ID NO: 5094 - RNA, 20 nt, synthetic construct
  source 1..20: mol_type = other RNA
agaaagagacttgctacatg

SEQ ID NO: 5095 - RNA, 20 nt, synthetic construct
  source 1..20: mol_type = other RNA
agacttgctacatgaggagt

SEQ ID NO: 5096 - RNA, 20 nt, synthetic construct
  source 1..20: mol_type = other RNA
tacatgaggagtaggtgatg

SEQ ID NO: 5097 - RNA, 20 nt, synthetic construct
  source 1..20: mol_type = other RNA
cactctaaactcagctttag

SEQ ID NO: 5098 - RNA, 20 nt, synthetic construct
  source 1..20: mol_type = other RNA
atccttgacttgtggtcttg

SEQ ID NO: 5099 - RNA, 20 nt, synthetic construct
  source 1..20: mol_type = other RNA
tactggtgatccttgacttg

SEQ ID NO: 5100 - RNA, 20 nt, synthetic construct
  source 1..20: mol_type = other RNA
agccacaagaccacaagtca

SEQ ID NO: 5101 - RNA, 20 nt, synthetic construct
  source 1..20: mol_type = other RNA
ctctagctgctgggaactac

SEQ ID NO: 5102 - RNA, 20 nt, synthetic construct
  source 1..20: mol_type = other RNA
ccttgcctcctctagctgct

SEQ ID NO: 5103 - RNA, 20 nt, synthetic construct
  source 1..20: mol_type = other RNA
tccttgcctcctctagctgc

SEQ ID NO: 5104 - RNA, 20 nt, synthetic construct
  source 1..20: mol_type = other RNA
cagtagttcccagcagctag

SEQ ID NO: 5105 - RNA, 20 nt, synthetic construct
  source 1..20: mol_type = other RNA
tagttcccagcagctagagg

SEQ ID NO: 5106 - RNA, 20 nt, synthetic construct
  source 1..20: mol_type = other RNA
cccagcagctagaggaggca

SEQ ID NO: 5107 - RNA, 20 nt, synthetic construct
  source 1..20: mol_type = other RNA
gctgcctctggaggctcgag

SEQ ID NO: 5108 - RNA, 20 nt, synthetic construct
  source 1..20: mol_type = other RNA
cgctgcctctggaggctcga

SEQ ID NO: 5109 - RNA, 20 nt, synthetic construct
  source 1..20: mol_type = other RNA
acgctgcctctggaggctcg

SEQ ID NO: 5110 - RNA, 20 nt, synthetic construct
  source 1..20: mol_type = other RNA
ttctcccctcgagcctccag

SEQ ID NO: 5111 - RNA, 20 nt, synthetic construct
  source 1..20: mol_type = other RNA
cagggccacgctgcctctgg

SEQ ID NO: 5112 - RNA, 20 nt, synthetic construct
  source 1..20: mol_type = other RNA
cagcagggccacgctgcctc

SEQ ID NO: 5113 - RNA, 20 nt, synthetic construct
  source 1..20: mol_type = other RNA
tcgagcctccagaggcagcg

SEQ ID NO: 5114 - RNA, 20 nt, synthetic construct
  source 1..20: mol_type = other RNA
ttgaagccaaggtgtcagca

SEQ ID NO: 5115 - RNA, 20 nt, synthetic construct
  source 1..20: mol_type = other RNA
gttgaagccaaggtgtcagc

SEQ ID NO: 5116 - RNA, 20 nt, synthetic construct
  source 1..20: mol_type = other RNA
gcgtggccctgctgacacct

SEQ ID NO: 5117 - RNA, 20 nt, synthetic construct
  source 1..20: mol_type = other RNA
gaggccagaagttgaagcca

SEQ ID NO: 5118 - RNA, 20 nt, synthetic construct
  source 1..20: mol_type = other RNA
gacaccttggcttcaacttc

SEQ ID NO: 5119 - RNA, 20 nt, synthetic construct
  source 1..20: mol_type = other RNA
ttattctctcatggttctgg

SEQ ID NO: 5120 - RNA, 20 nt, synthetic construct
  source 1..20: mol_type = other RNA
actttattctctcatggttc

SEQ ID NO: 5121 - RNA, 20 nt, synthetic construct
  source 1..20: mol_type = other RNA
aacagcactttattctctca

SEQ ID NO: 5122 - RNA, 20 nt, synthetic construct
  source 1..20: mol_type = other RNA
tgctgttgttctgagctacc

SEQ ID NO: 5123 - RNA, 20 nt, synthetic construct
  source 1..20: mol_type = other RNA
gttctgagctacctggatgc

SEQ ID NO: 5124 - RNA, 20 nt, synthetic construct
  source 1..20: mol_type = other RNA
gaaacaaggtaccagcatcc

SEQ ID NO: 5125 - RNA, 20 nt, synthetic construct
  source 1..20: mol_type = other RNA
ttcccagggctgctgaaaca

SEQ ID NO: 5126 - RNA, 20 nt, synthetic construct
  source 1..20: mol_type = other RNA
gtaccttgtttcagcagccc

SEQ ID NO: 5127 - RNA, 20 nt, synthetic construct
  source 1..20: mol_type = other RNA
taccttgtttcagcagccct

SEQ ID NO: 5128 - RNA, 20 nt, synthetic construct
  source 1..20: mol_type = other RNA
catggtatattcatttccca

SEQ ID NO: 5129 - RNA, 20 nt, synthetic construct
  source 1..20: mol_type = other RNA
ccatggtatattcatttccc

SEQ ID NO: 5130 - RNA, 20 nt, synthetic construct
  source 1..20: mol_type = other RNA
cctgggaaatgaatatacca

SEQ ID NO: 5131 - RNA, 20 nt, synthetic construct
  source 1..20: mol_type = other RNA
ggttcaggtccatgtttcca

SEQ ID NO: 5132 - RNA, 20 nt, synthetic construct
  source 1..20: mol_type = other RNA
atgaatataccatggaaaca

SEQ ID NO: 5133 - RNA, 20 nt, synthetic construct
  source 1..20: mol_type = other RNA
ggaaacatggacctgaacca

SEQ ID NO: 5134 - RNA, 20 nt, synthetic construct
  source 1..20: mol_type = other RNA
cctgccaggatccgtggttc

SEQ ID NO: 5135 - RNA, 20 nt, synthetic construct
  source 1..20: mol_type = other RNA
aaggctcctgccaggatccg

SEQ ID NO: 5136 - RNA, 20 nt, synthetic construct
  source 1..20: mol_type = other RNA
tggacctgaaccacggatcc

SEQ ID NO: 5137 - RNA, 20 nt, synthetic construct
  source 1..20: mol_type = other RNA
cctgaaccacggatcctggc

SEQ ID NO: 5138 - RNA, 20 nt, synthetic construct
  source 1..20: mol_type = other RNA
gtggctctaaggctcctgcc

SEQ ID NO: 5139 - RNA, 20 nt, synthetic construct
  source 1..20: mol_type = other RNA
ggctcatctgtgtggctcta

SEQ ID NO: 5140 - RNA, 20 nt, synthetic construct
  source 1..20: mol_type = other RNA
aagctgaaggctcatctgtg

SEQ ID NO: 5141 - RNA, 20 nt, synthetic construct
  source 1..20: mol_type = other RNA
acacagatgagccttcagct

SEQ ID NO: 5142 - RNA, 20 nt, synthetic construct
  source 1..20: mol_type = other RNA
gctggggaaagccaagctga

SEQ ID NO: 5143 - RNA, 20 nt, synthetic construct
  source 1..20: mol_type = other RNA
agatcatgtagctcttgctg

SEQ ID NO: 5144 - RNA, 20 nt, synthetic construct
  source 1..20: mol_type = other RNA
aagatcatgtagctcttgct

SEQ ID NO: 5145 - RNA, 20 nt, synthetic construct
  source 1..20: mol_type = other RNA
caagatcatgtagctcttgc

SEQ ID NO: 5146 - RNA, 20 nt, synthetic construct
  source 1..20: mol_type = other RNA
gcaagagctacatgatcttg

SEQ ID NO: 5147 - RNA, 20 nt, synthetic construct
  source 1..20: mol_type = other RNA
aggaagctgcttgtcttctc

SEQ ID NO: 5148 - RNA, 20 nt, synthetic construct
  source 1..20: mol_type = other RNA
ggaagctgcttgtcttctct

SEQ ID NO: 5149 - RNA, 20 nt, synthetic construct
  source 1..20: mol_type = other RNA
tcaagttcttcatctgccaa

SEQ ID NO: 5150 - RNA, 20 nt, synthetic construct
  source 1..20: mol_type = other RNA
gtaagcattattgtctccat

SEQ ID NO: 5151 - RNA, 20 nt, synthetic construct
  source 1..20: mol_type = other RNA
gacaataatgcttacttcct

SEQ ID NO: 5152 - RNA, 20 nt, synthetic construct
  source 1..20: mol_type = other RNA
caataaagctgttaaaacct

SEQ ID NO: 5153 - RNA, 20 nt, synthetic construct
  source 1..20: mol_type = other RNA
atgaactgtactttttaagt

SEQ ID NO: 5154 - RNA, 20 nt, synthetic construct
  source 1..20: mol_type = other RNA
catgaactgtactttttaag

SEQ ID NO: 5155 - RNA, 20 nt, synthetic construct
  source 1..20: mol_type = other RNA
tcccaaagtgttgggattac

SEQ ID NO: 5156 - RNA, 20 nt, synthetic construct
  source 1..20: mol_type = other RNA
cctcggcctcccaaagtgtt

SEQ ID NO: 5157 - RNA, 20 nt, synthetic construct
  source 1..20: mol_type = other RNA
tgcctgtaatcccaacactt

SEQ ID NO: 5158 - RNA, 20 nt, synthetic construct
  source 1..20: mol_type = other RNA
tcctcggcctcccaaagtgt

SEQ ID NO: 5159 - RNA, 20 nt, synthetic construct
  source 1..20: mol_type = other RNA
gcctgtaatcccaacacttt

SEQ ID NO: 5160 - RNA, 20 nt, synthetic construct
  source 1..20: mol_type = other RNA
tgtaatcccaacactttggg

SEQ ID NO: 5161 - RNA, 20 nt, synthetic construct
  source 1..20: mol_type = other RNA
cccaacactttgggaggccg

SEQ ID NO: 5162 - RNA, 20 nt, synthetic construct
  source 1..20: mol_type = other RNA
aagtgatccgcctgtctcct

SEQ ID NO: 5163 - RNA, 20 nt, synthetic construct
  source 1..20: mol_type = other RNA
ctttgggaggccgaggagac

SEQ ID NO: 5164 - RNA, 20 nt, synthetic construct
  source 1..20: mol_type = other RNA
tgggaggccgaggagacagg

SEQ ID NO: 5165 - RNA, 20 nt, synthetic construct
  source 1..20: mol_type = other RNA
ggagacaggcggatcacttg

SEQ ID NO: 5166 - RNA, 20 nt, synthetic construct
  source 1..20: mol_type = other RNA
caggcggatcacttgaggtc

SEQ ID NO: 5167 - RNA, 20 nt, synthetic construct
  source 1..20: mol_type = other RNA
tcaggagtttgagaacagcc

SEQ ID NO: 5168 - RNA, 20 nt, synthetic construct
  source 1..20: mol_type = other RNA
agtgtttcaccattttggcc

SEQ ID NO: 5169 - RNA, 20 nt, synthetic construct
  source 1..20: mol_type = other RNA
tgagaacagcctggccaaaa

SEQ ID NO: 5170 - RNA, 20 nt, synthetic construct
  source 1..20: mol_type = other RNA
gagacagtgtttcaccattt

SEQ ID NO: 5171 - RNA, 20 nt, synthetic construct
  source 1..20: mol_type = other RNA
ctaaaaatgcaaaaattagc

SEQ ID NO: 5172 - RNA, 20 nt, synthetic construct
  source 1..20: mol_type = other RNA
taaaaatgcaaaaattagcc

SEQ ID NO: 5173 - RNA, 20 nt, synthetic construct
  source 1..20: mol_type = other RNA
atgcaaaaattagccgggtg

SEQ ID NO: 5174 - RNA, 20 nt, synthetic construct
  source 1..20: mol_type = other RNA
caggcacccaccaccacacc

SEQ ID NO: 5175 - RNA, 20 nt, synthetic construct
  source 1..20: mol_type = other RNA
caaaaattagccgggtgtgg

SEQ ID NO: 5176 - RNA, 20 nt, synthetic construct
  source 1..20: mol_type = other RNA
aaattagccgggtgtggtgg

SEQ ID NO: 5177 - RNA, 20 nt, synthetic construct
  source 1..20: mol_type = other RNA
aattagccgggtgtggtggt

SEQ ID NO: 5178 - RNA, 20 nt, synthetic construct
  source 1..20: mol_type = other RNA
tcctgagcagctgggattac

SEQ ID NO: 5179 - RNA, 20 nt, synthetic construct
  source 1..20: mol_type = other RNA
cctcagcctcctgagcagct

SEQ ID NO: 5180 - RNA, 20 nt, synthetic construct
  source 1..20: mol_type = other RNA
gcctcagcctcctgagcagc

SEQ ID NO: 5181 - RNA, 20 nt, synthetic construct
  source 1..20: mol_type = other RNA
gcctgtaatcccagctgctc

SEQ ID NO: 5182 - RNA, 20 nt, synthetic construct
  source 1..20: mol_type = other RNA
tgtaatcccagctgctcagg

SEQ ID NO: 5183 - RNA, 20 nt, synthetic construct
  source 1..20: mol_type = other RNA
cccagctgctcaggaggctg

SEQ ID NO: 5184 - RNA, 20 nt, synthetic construct
  source 1..20: mol_type = other RNA
aggaggctgaggcagaagaa

SEQ ID NO: 5185 - RNA, 20 nt, synthetic construct
  source 1..20: mol_type = other RNA
gcagaagaatggcttgaacc

SEQ ID NO: 5186 - RNA, 20 nt, synthetic construct
  source 1..20: mol_type = other RNA
cagaagaatggcttgaacct

SEQ ID NO: 5187 - RNA, 20 nt, synthetic construct
  source 1..20: mol_type = other RNA
aagaatggcttgaacctggg

SEQ ID NO: 5188 - RNA, 20 nt, synthetic construct
  source 1..20: mol_type = other RNA
cactgcaacgtctgcctccc

SEQ ID NO: 5189 - RNA, 20 nt, synthetic construct
  source 1..20: mol_type = other RNA
ggagtgcaggggtgcaatct

SEQ ID NO: 5190 - RNA, 20 nt, synthetic construct
  source 1..20: mol_type = other RNA
tcacccaggctggagtgcag

SEQ ID NO: 5191 - RNA, 20 nt, synthetic construct
  source 1..20: mol_type = other RNA
gtcacccaggctggagtgca

SEQ ID NO: 5192 - RNA, 20 nt, synthetic construct
  source 1..20: mol_type = other RNA
tgtcacccaggctggagtgc

SEQ ID NO: 5193 - RNA, 20 nt, synthetic construct
  source 1..20: mol_type = other RNA
tgcacccctgcactccagcc

SEQ ID NO: 5194 - RNA, 20 nt, synthetic construct
  source 1..20: mol_type = other RNA
gcacccctgcactccagcct

SEQ ID NO: 5195 - RNA, 20 nt, synthetic construct
  source 1..20: mol_type = other RNA
ggagtctctgtcacccaggc

SEQ ID NO: 5196 - RNA, 20 nt, synthetic construct
  source 1..20: mol_type = other RNA
agacggagtctctgtcaccc

SEQ ID NO: 5197 - RNA, 20 nt, synthetic construct
  source 1..20: mol_type = other RNA
ttttttttttttttttaaga

SEQ ID NO: 5198 - RNA, 20 nt, synthetic construct
  source 1..20: mol_type = other RNA
agtagagttcagtgttcttt

SEQ ID NO: 5199 - RNA, 20 nt, synthetic construct
  source 1..20: mol_type = other RNA
gtagagttcagtgttctttt

SEQ ID NO: 5200 - RNA, 20 nt, synthetic construct
  source 1..20: mol_type = other RNA
ttgactgtggggatgggaga

SEQ ID NO: 5201 - RNA, 20 nt, synthetic construct
  source 1..20: mol_type = other RNA
ctaaaattgactgtggggat

SEQ ID NO: 5202 - RNA, 20 nt, synthetic construct
  source 1..20: mol_type = other RNA
gctaaaattgactgtgggga

SEQ ID NO: 5203 - RNA, 20 nt, synthetic construct
  source 1..20: mol_type = other RNA
atgtgctaaaattgactgtg

SEQ ID NO: 5204 - RNA, 20 nt, synthetic construct
  source 1..20: mol_type = other RNA
aatgtgctaaaattgactgt

SEQ ID NO: 5205 - RNA, 20 nt, synthetic construct
  source 1..20: mol_type = other RNA
aaatgtgctaaaattgactg

SEQ ID NO: 5206 - RNA, 20 nt, synthetic construct
  source 1..20: mol_type = other RNA
gggtctggagtttctttagg

SEQ ID NO: 5207 - RNA, 20 nt, synthetic construct
  source 1..20: mol_type = other RNA
tgggtctggagtttctttag

SEQ ID NO: 5208 - RNA, 20 nt, synthetic construct
  source 1..20: mol_type = other RNA
atgggtctggagtttcttta

SEQ ID NO: 5209 - RNA, 20 nt, synthetic construct
  source 1..20: mol_type = other RNA
gatgggtctggagtttcttt

SEQ ID NO: 5210 - RNA, 20 nt, synthetic construct
  source 1..20: mol_type = other RNA
ggaacaactgctgatgggtc

SEQ ID NO: 5211 - RNA, 20 nt, synthetic construct
  source 1..20: mol_type = other RNA
aatggggaacaactgctgat

SEQ ID NO: 5212 - RNA, 20 nt, synthetic construct
  source 1..20: mol_type = other RNA
aaatggggaacaactgctga

SEQ ID NO: 5213 - RNA, 20 nt, synthetic construct
  source 1..20: mol_type = other RNA
agggattttggaaggaaatg

SEQ ID NO: 5214 - RNA, 20 nt, synthetic construct
  source 1..20: mol_type = other RNA
gagggattttggaaggaaat

SEQ ID NO: 5215 - RNA, 20 nt, synthetic construct
  source 1..20: mol_type = other RNA
agagggattttggaaggaaa

SEQ ID NO: 5216 - RNA, 20 nt, synthetic construct
  source 1..20: mol_type = other RNA
tggcagagagggattttgga

SEQ ID NO: 5217 - RNA, 20 nt, synthetic construct
  source 1..20: mol_type = other RNA
ggcttggcagagagggattt

SEQ ID NO: 5218 - RNA, 20 nt, synthetic construct
  source 1..20: mol_type = other RNA
tgcctagggcttggcagaga

SEQ ID NO: 5219 - RNA, 20 nt, synthetic construct
  source 1..20: mol_type = other RNA
ttgcctagggcttggcagag

SEQ ID NO: 5220 - RNA, 20 nt, synthetic construct
  source 1..20: mol_type = other RNA
atccctctctgccaagccct

SEQ ID NO: 5221 - RNA, 20 nt, synthetic construct
  source 1..20: mol_type = other RNA
attagtggttgcctagggct

SEQ ID NO: 5222 - RNA, 20 nt, synthetic construct
  source 1..20: mol_type = other RNA
agcatattagtggttgccta

SEQ ID NO: 5223 - RNA, 20 nt, synthetic construct
  source 1..20: mol_type = other RNA
aagcatattagtggttgcct

SEQ ID NO: 5224 - RNA, 20 nt, synthetic construct
  source 1..20: mol_type = other RNA
taagaaagaaagcatattag

SEQ ID NO: 5225 - RNA, 20 nt, synthetic construct
  source 1..20: mol_type = other RNA
aaaaaaaaattaatagagat

SEQ ID NO: 5226 - RNA, 20 nt, synthetic construct
  source 1..20: mol_type = other RNA
aggcttttgctatgttgccc

SEQ ID NO: 5227 - RNA, 20 nt, synthetic construct
  source 1..20: mol_type = other RNA
ttttgctatgttgcccaggc

SEQ ID NO: 5228 - RNA, 20 nt, synthetic construct
  source 1..20: mol_type = other RNA
caggtgttcaagaccagcct

SEQ ID NO: 5229 - RNA, 20 nt, synthetic construct
  source 1..20: mol_type = other RNA
ccaggtgttcaagaccagcc

SEQ ID NO: 5230 - RNA, 20 nt, synthetic construct
  source 1..20: mol_type = other RNA
ccaggctggtcttgaacacc

SEQ ID NO: 5231 - RNA, 20 nt, synthetic construct
  source 1..20: mol_type = other RNA
caggctggtcttgaacacct

SEQ ID NO: 5232 - RNA, 20 nt, synthetic construct
  source 1..20: mol_type = other RNA
caggagaatcgcttgagccc

SEQ ID NO: 5233 - RNA, 20 nt, synthetic construct
  source 1..20: mol_type = other RNA
gcactttgggaggctgagac

SEQ ID NO: 5234 - RNA, 20 nt, synthetic construct
  source 1..20: mol_type = other RNA
tgaaatcccagcactttggg

SEQ ID NO: 5235 - RNA, 20 nt, synthetic construct
  source 1..20: mol_type = other RNA
gcctgaaatcccagcacttt

SEQ ID NO: 5236 - RNA, 20 nt, synthetic construct
  source 1..20: mol_type = other RNA
gtctcagcctcccaaagtgc

SEQ ID NO: 5237 - RNA, 20 nt, synthetic construct
  source 1..20: mol_type = other RNA
tgcctgaaatcccagcactt

SEQ ID NO: 5238 - RNA, 20 nt, synthetic construct
  source 1..20: mol_type = other RNA
tctcagcctcccaaagtgct

SEQ ID NO: 5239 - RNA, 20 nt, synthetic construct
  source 1..20: mol_type = other RNA
tcccaaagtgctgggatttc

SEQ ID NO: 5240 - RNA, 20 nt, synthetic construct
  source 1..20: mol_type = other RNA
gtaggaggggtggggcgtgg

SEQ ID NO: 5241 - RNA, 20 nt, synthetic construct
  source 1..20: mol_type = other RNA
aaagtaggaggggtggggcg

SEQ ID NO: 5242 - RNA, 20 nt, synthetic construct
  source 1..20: mol_type = other RNA
gacataaagtaggaggggtg

SEQ ID NO: 5243 - RNA, 20 nt, synthetic construct
  source 1..20: mol_type = other RNA
agacataaagtaggaggggt

SEQ ID NO: 5244 - RNA, 20 nt, synthetic construct
  source 1..20: mol_type = other RNA
gagacataaagtaggagggg

SEQ ID NO: 5245 - RNA, 20 nt, synthetic construct
  source 1..20: mol_type = other RNA
atggagacataaagtaggag

SEQ ID NO: 5246 - RNA, 20 nt, synthetic construct
  source 1..20: mol_type = other RNA
catggagacataaagtagga

SEQ ID NO: 5247 - RNA, 20 nt, synthetic construct
  source 1..20: mol_type = other RNA
ccatggagacataaagtagg

SEQ ID NO: 5248 - RNA, 20 nt, synthetic construct
  source 1..20: mol_type = other RNA
aatccatggagacataaagt

SEQ ID NO: 5249 - RNA, 20 nt, synthetic construct
  source 1..20: mol_type = other RNA
cctcctactttatgtctcca

SEQ ID NO: 5250 - RNA, 20 nt, synthetic construct
  source 1..20: mol_type = other RNA
gaccaaaacaggcaaatcca

SEQ ID NO: 5251 - RNA, 20 nt, synthetic construct
  source 1..20: mol_type = other RNA
ctccatggatttgcctgttt

SEQ ID NO: 5252 - RNA, 20 nt, synthetic construct
  source 1..20: mol_type = other RNA
ttatttgaaatgaccaaaac

SEQ ID NO: 5253 - RNA, 20 nt, synthetic construct
  source 1..20: mol_type = other RNA
gtgaagaagccggacacaaa

SEQ ID NO: 5254 - RNA, 20 nt, synthetic construct
  source 1..20: mol_type = other RNA
agtgaagaagccggacacaa

SEQ ID NO: 5255 - RNA, 20 nt, synthetic construct
  source 1..20: mol_type = other RNA
aatatgtgaccctttgtgtc

SEQ ID NO: 5256 - RNA, 20 nt, synthetic construct
  source 1..20: mol_type = other RNA
aaaatgctaagtgaagaagc

SEQ ID NO: 5257 - RNA, 20 nt, synthetic construct
  source 1..20: mol_type = other RNA
ttcacttagcatttttttta

SEQ ID NO: 5258 - RNA, 20 nt, synthetic construct
  source 1..20: mol_type = other RNA
cactgatacatgctggaaca

SEQ ID NO: 5259 - RNA, 20 nt, synthetic construct
  source 1..20: mol_type = other RNA
gagaaagcactgatacatgc

SEQ ID NO: 5260 - RNA, 20 nt, synthetic construct
  source 1..20: mol_type = other RNA
tcagtgctttctccctttaa

SEQ ID NO: 5261 - RNA, 20 nt, synthetic construct
  source 1..20: mol_type = other RNA
taaagtattccaccattaaa

SEQ ID NO: 5262 - RNA, 20 nt, synthetic construct
  source 1..20: mol_type = other RNA
ataaagtattccaccattaa

SEQ ID NO: 5263 - RNA, 20 nt, synthetic construct
  source 1..20: mol_type = other RNA
gtgctttctccctttaatgg

SEQ ID NO: 5264 - RNA, 20 nt, synthetic construct
  source 1..20: mol_type = other RNA
aatatccaccaaaaaataaa

SEQ ID NO: 5265 - RNA, 20 nt, synthetic construct
  source 1..20: mol_type = other RNA
ttgtttatccatttattttt

SEQ ID NO: 5266 - RNA, 20 nt, synthetic construct
  source 1..20: mol_type = other RNA
tttatccatttattttttgg

SEQ ID NO: 5267 - RNA, 20 nt, synthetic construct
  source 1..20: mol_type = other RNA
tttattttttggtggatatt

SEQ ID NO: 5268 - RNA, 20 nt, synthetic construct
  source 1..20: mol_type = other RNA
ttattttttggtggatattt

SEQ ID NO: 5269 - RNA, 20 nt, synthetic construct
  source 1..20: mol_type = other RNA
tttgggctgtttttatattt

SEQ ID NO: 5270 - RNA, 20 nt, synthetic construct
  source 1..20: mol_type = other RNA
tatacacgaatgttcacaga

SEQ ID NO: 5271 - RNA, 20 nt, synthetic construct
  source 1..20: mol_type = other RNA
ttctgtgaacattcgtgtat

SEQ ID NO: 5272 - RNA, 20 nt, synthetic construct
  source 1..20: mol_type = other RNA
ttcgtgtataggtttttgtg

SEQ ID NO: 5273 - RNA, 20 nt, synthetic construct
  source 1..20: mol_type = other RNA
ggtttttgtgtggatatatc

SEQ ID NO: 5274 - RNA, 20 nt, synthetic construct
  source 1..20: mol_type = other RNA
cataatatgatacatattta

SEQ ID NO: 5275 - RNA, 20 nt, synthetic construct
  source 1..20: mol_type = other RNA
ataatatgatacatatttat

SEQ ID NO: 5276 - RNA, 20 nt, synthetic construct
  source 1..20: mol_type = other RNA
taatatgatacatatttatg

SEQ ID NO: 5277 - RNA, 20 nt, synthetic construct
  source 1..20: mol_type = other RNA
atatttattacatgcataga

SEQ ID NO: 5278 - RNA, 20 nt, synthetic construct
  source 1..20: mol_type = other RNA
gaaggtataatgatcatgtc

SEQ ID NO: 5279 - RNA, 20 nt, synthetic construct
  source 1..20: mol_type = other RNA
tgatcatgtcaggatatttg

SEQ ID NO: 5280 - RNA, 20 nt, synthetic construct
  source 1..20: mol_type = other RNA
atatttgaggtatccacatt

SEQ ID NO: 5281 - RNA, 20 nt, synthetic construct
  source 1..20: mol_type = other RNA
tatttgaggtatccacattt

SEQ ID NO: 5282 - RNA, 20 nt, synthetic construct
  source 1..20: mol_type = other RNA
tctttaaacaatcccaaatg

SEQ ID NO: 5283 - RNA, 20 nt, synthetic construct
  source 1..20: mol_type = other RNA
tttcctcatcatttgttgaa

SEQ ID NO: 5284 - RNA, 20 nt, synthetic construct
  source 1..20: mol_type = other RNA
atttcctcatcatttgttga

SEQ ID NO: 5285 - RNA, 20 nt, synthetic construct
  source 1..20: mol_type = other RNA
atgcccttcaacaaatgatg

SEQ ID NO: 5286 - RNA, 20 nt, synthetic construct
  source 1..20: mol_type = other RNA
tttcctaatatgtaaactga

SEQ ID NO: 5287 - RNA, 20 nt, synthetic construct
  source 1..20: mol_type = other RNA
actccttcagtttacatatt

SEQ ID NO: 5288 - RNA, 20 nt, synthetic construct
  source 1..20: mol_type = other RNA
gtttacatattaggaaactg

SEQ ID NO: 5289 - RNA, 20 nt, synthetic construct
  source 1..20: mol_type = other RNA
taggaaactgaggcacagaa

SEQ ID NO: 5290 - RNA, 20 nt, synthetic construct
  source 1..20: mol_type = other RNA
caatgctctactgctttggg

SEQ ID NO: 5291 - RNA, 20 nt, synthetic construct
  source 1..20: mol_type = other RNA
ccacaatgctctactgcttt

SEQ ID NO: 5292 - RNA, 20 nt, synthetic construct
  source 1..20: mol_type = other RNA
accacaatgctctactgctt

SEQ ID NO: 5293 - RNA, 20 nt, synthetic construct
  source 1..20: mol_type = other RNA
cccaaagcagtagagcattg

SEQ ID NO: 5294 - RNA, 20 nt, synthetic construct
  source 1..20: mol_type = other RNA
agagcattgtggttaaatgc

SEQ ID NO: 5295 - RNA, 20 nt, synthetic construct
  source 1..20: mol_type = other RNA
aggacttcagtcagactgtc

SEQ ID NO: 5296 - RNA, 20 nt, synthetic construct
  source 1..20: mol_type = other RNA
ggacttcagtcagactgtct

SEQ ID NO: 5297 - RNA, 20 nt, synthetic construct
  source 1..20: mol_type = other RNA
gactgtctgggttcaaatcc

SEQ ID NO: 5298 - RNA, 20 nt, synthetic construct
  source 1..20: mol_type = other RNA
acccatgtccaagtggaacc

SEQ ID NO: 5299 - RNA, 20 nt, synthetic construct
  source 1..20: mol_type = other RNA
gttcaaatcctggttccact

SEQ ID NO: 5300 - RNA, 20 nt, synthetic construct
  source 1..20: mol_type = other RNA
taaggaaacccatgtccaag

SEQ ID NO: 5301 - RNA, 20 nt, synthetic construct
  source 1..20: mol_type = other RNA
atcctggttccacttggaca

SEQ ID NO: 5302 - RNA, 20 nt, synthetic construct
  source 1..20: mol_type = other RNA
tcctggttccacttggacat

SEQ ID NO: 5303 - RNA, 20 nt, synthetic construct
  source 1..20: mol_type = other RNA
gaggtgaagtgatttatgta

SEQ ID NO: 5304 - RNA, 20 nt, synthetic construct
  source 1..20: mol_type = other RNA
gagaaaactgaggctcagag

SEQ ID NO: 5305 - RNA, 20 nt, synthetic construct
  source 1..20: mol_type = other RNA
ctttgcatatgagaaaactg

SEQ ID NO: 5306 - RNA, 20 nt, synthetic construct
  source 1..20: mol_type = other RNA
gttttctcatatgcaaagtg

SEQ ID NO: 5307 - RNA, 20 nt, synthetic construct
  source 1..20: mol_type = other RNA
tatcagtaaccatgtaagga

SEQ ID NO: 5308 - RNA, 20 nt, synthetic construct
  source 1..20: mol_type = other RNA
ataataataccttccttaca

SEQ ID NO: 5309 - RNA, 20 nt, synthetic construct
  source 1..20: mol_type = other RNA
ctcatatcagtaaccatgta

SEQ ID NO: 5310 - RNA, 20 nt, synthetic construct
  source 1..20: mol_type = other RNA
tatacgccaggcacatgagc

SEQ ID NO: 5311 - RNA, 20 nt, synthetic construct
  source 1..20: mol_type = other RNA
aatgtgccagctcatgtgcc

SEQ ID NO: 5312 - RNA, 20 nt, synthetic construct
  source 1..20: mol_type = other RNA
taaagcacctcctatacgcc

SEQ ID NO: 5313 - RNA, 20 nt, synthetic construct
  source 1..20: mol_type = other RNA
agctcatgtgcctggcgtat

SEQ ID NO: 5314 - RNA, 20 nt, synthetic construct
  source 1..20: mol_type = other RNA
tcatgtgcctggcgtatagg

SEQ ID NO: 5315 - RNA, 20 nt, synthetic construct
  source 1..20: mol_type = other RNA
gccatgagtggtaacagcta

SEQ ID NO: 5316 - RNA, 20 nt, synthetic construct
  source 1..20: mol_type = other RNA
accttagctgttaccactca

SEQ ID NO: 5317 - RNA, 20 nt, synthetic construct
  source 1..20: mol_type = other RNA
acatttggcaatgccatgag

SEQ ID NO: 5318 - RNA, 20 nt, synthetic construct
  source 1..20: mol_type = other RNA
actcatggcattgccaaatg

SEQ ID NO: 5319 - RNA, 20 nt, synthetic construct
  source 1..20: mol_type = other RNA
ctcatggcattgccaaatgt

SEQ ID NO: 5320 - RNA, 20 nt, synthetic construct
  source 1..20: mol_type = other RNA
caggagacccgtcccacatt

SEQ ID NO: 5321 - RNA, 20 nt, synthetic construct
  source 1..20: mol_type = other RNA
tggcattgccaaatgtggga

SEQ ID NO: 5322 - RNA, 20 nt, synthetic construct
  source 1..20: mol_type = other RNA
ggcattgccaaatgtgggac

SEQ ID NO: 5323 - RNA, 20 nt, synthetic construct
  source 1..20: mol_type = other RNA
caatctcacaccagagagtc

SEQ ID NO: 5324 - RNA, 20 nt, synthetic construct
  source 1..20: mol_type = other RNA
ggacgggtctcctgactctc

SEQ ID NO: 5325 - RNA, 20 nt, synthetic construct
  source 1..20: mol_type = other RNA
actctctggtgtgagattga

SEQ ID NO: 5326 - RNA, 20 nt, synthetic construct
  source 1..20: mol_type = other RNA
gaaaagggaactggaaagtg

SEQ ID NO: 5327 - RNA, 20 nt, synthetic construct
  source 1..20: mol_type = other RNA
caggaggtagaaaagggaac

SEQ ID NO: 5328 - RNA, 20 nt, synthetic construct
  source 1..20: mol_type = other RNA
gatacccaggaggtagaaaa

SEQ ID NO: 5329 - RNA, 20 nt, synthetic construct
  source 1..20: mol_type = other RNA
agatacccaggaggtagaaa

SEQ ID NO: 5330 - RNA, 20 nt, synthetic construct
  source 1..20: mol_type = other RNA
cagttcccttttctacctcc

SEQ ID NO: 5331 - RNA, 20 nt, synthetic construct
  source 1..20: mol_type = other RNA
agttcccttttctacctcct

SEQ ID NO: 5332 - RNA, 20 nt, synthetic construct
  source 1..20: mol_type = other RNA
catatgagaagatacccagg

SEQ ID NO: 5333 - RNA, 20 nt, synthetic construct
  source 1..20: mol_type = other RNA
aaccatatgagaagataccc

SEQ ID NO: 5334 - RNA, 20 nt, synthetic construct
  source 1..20: mol_type = other RNA
ctcctgggtatcttctcata

SEQ ID NO: 5335 - RNA, 20 nt, synthetic construct
  source 1..20: mol_type = other RNA
tcatatggttgtaagttcct

SEQ ID NO: 5336 - RNA, 20 nt, synthetic construct
  source 1..20: mol_type = other RNA
tatggttgtaagttccttgg

SEQ ID NO: 5337 - RNA, 20 nt, synthetic construct
  source 1..20: mol_type = other RNA
agccacattcccttcctcca

SEQ ID NO: 5338 - RNA, 20 nt, synthetic construct
  source 1..20: mol_type = other RNA
gttgtaagttccttggagga

SEQ ID NO: 5339 - RNA, 20 nt, synthetic construct
  source 1..20: mol_type = other RNA
ttgtaagttccttggaggaa

SEQ ID NO: 5340 - RNA, 20 nt, synthetic construct
  source 1..20: mol_type = other RNA
ttccttggaggaagggaatg

SEQ ID NO: 5341 - RNA, 20 nt, synthetic construct
  source 1..20: mol_type = other RNA
ctcttatatgctcagcgtgg

SEQ ID NO: 5342 - RNA, 20 nt, synthetic construct
  source 1..20: mol_type = other RNA
cacctcttatatgctcagcg

SEQ ID NO: 5343 - RNA, 20 nt, synthetic construct
  source 1..20: mol_type = other RNA
caccacgctgagcatataag

SEQ ID NO: 5344 - RNA, 20 nt, synthetic construct
  source 1..20: mol_type = other RNA
tggtgagggctggggatgag

SEQ ID NO: 5345 - RNA, 20 nt, synthetic construct
  source 1..20: mol_type = other RNA
ctcccagctggtgagggctg

SEQ ID NO: 5346 - RNA, 20 nt, synthetic construct
  source 1..20: mol_type = other RNA
actcccagctggtgagggct

SEQ ID NO: 5347 - RNA, 20 nt, synthetic construct
  source 1..20: mol_type = other RNA
aactcccagctggtgagggc

SEQ ID NO: 5348 - RNA, 20 nt, synthetic construct
  source 1..20: mol_type = other RNA
caacaactcccagctggtga

SEQ ID NO: 5349 - RNA, 20 nt, synthetic construct
  source 1..20: mol_type = other RNA
acaacaactcccagctggtg

SEQ ID NO: 5350 - RNA, 20 nt, synthetic construct
  source 1..20: mol_type = other RNA
catccccagccctcaccagc

SEQ ID NO: 5351 - RNA, 20 nt, synthetic construct
  source 1..20: mol_type = other RNA
atccccagccctcaccagct

SEQ ID NO: 5352 - RNA, 20 nt, synthetic construct
  source 1..20: mol_type = other RNA
cacctacaacaactcccagc

SEQ ID NO: 5353 - RNA, 20 nt, synthetic construct
  source 1..20: mol_type = other RNA
caccagctgggagttgttgt

SEQ ID NO: 5354 - RNA, 20 nt, synthetic construct
  source 1..20: mol_type = other RNA
cctcacagggtgttggaaag

SEQ ID NO: 5355 - RNA, 20 nt, synthetic construct
  source 1..20: mol_type = other RNA
tcagtcacctcacagggtgt

SEQ ID NO: 5356 - RNA, 20 nt, synthetic construct
  source 1..20: mol_type = other RNA
cctctttccaacaccctgtg

SEQ ID NO: 5357 - RNA, 20 nt, synthetic construct
  source 1..20: mol_type = other RNA
caatgctcagtcacctcaca

SEQ ID NO: 5358 - RNA, 20 nt, synthetic construct
  source 1..20: mol_type = other RNA
acaatgctcagtcacctcac

SEQ ID NO: 5359 - RNA, 20 nt, synthetic construct
  source 1..20: mol_type = other RNA
tgagcattgtcttccctccc

SEQ ID NO: 5360 - RNA, 20 nt, synthetic construct
  source 1..20: mol_type = other RNA
acactgtgagctgcctggga

SEQ ID NO: 5361 - RNA, 20 nt, synthetic construct
  source 1..20: mol_type = other RNA
cacactgtgagctgcctggg

SEQ ID NO: 5362 - RNA, 20 nt, synthetic construct
  source 1..20: mol_type = other RNA
tggcacactgtgagctgcct

SEQ ID NO: 5363 - RNA, 20 nt, synthetic construct
  source 1..20: mol_type = other RNA
gtggcacactgtgagctgcc

SEQ ID NO: 5364 - RNA, 20 nt, synthetic construct
  source 1..20: mol_type = other RNA
cagctcacagtgtgccacca

SEQ ID NO: 5365 - RNA, 20 nt, synthetic construct
  source 1..20: mol_type = other RNA
taggggccccaactccatgg

SEQ ID NO: 5366 - RNA, 20 nt, synthetic construct
  source 1..20: mol_type = other RNA
acagtgtgccaccatggagt

SEQ ID NO: 5367 - RNA, 20 nt, synthetic construct
  source 1..20: mol_type = other RNA
ttctaggggccccaactcca

SEQ ID NO: 5368 - RNA, 20 nt, synthetic construct
  source 1..20: mol_type = other RNA
cagtgtgccaccatggagtt

SEQ ID NO: 5369 - RNA, 20 nt, synthetic construct
  source 1..20: mol_type = other RNA
agtgtgccaccatggagttg

SEQ ID NO: 5370 - RNA, 20 nt, synthetic construct
  source 1..20: mol_type = other RNA
atggagttggggcccctaga

SEQ ID NO: 5371 - RNA, 20 nt, synthetic construct
  source 1..20: mol_type = other RNA
tccaggtagccaccttctag

SEQ ID NO: 5372 - RNA, 20 nt, synthetic construct
  source 1..20: mol_type = other RNA
ctccaggtagccaccttcta

SEQ ID NO: 5373 - RNA, 20 nt, synthetic construct
  source 1..20: mol_type = other RNA
gagttggggcccctagaagg

SEQ ID NO: 5374 - RNA, 20 nt, synthetic construct
  source 1..20: mol_type = other RNA
gctccaggtagccaccttct

SEQ ID NO: 5375 - RNA, 20 nt, synthetic construct
  source 1..20: mol_type = other RNA
gcccctagaaggtggctacc

SEQ ID NO: 5376 - RNA, 20 nt, synthetic construct
  source 1..20: mol_type = other RNA
catcgctgttaagaagctcc

SEQ ID NO: 5377 - RNA, 20 nt, synthetic construct
  source 1..20: mol_type = other RNA
agaagtggtagaggcacagg

SEQ ID NO: 5378 - RNA, 20 nt, synthetic construct
  source 1..20: mol_type = other RNA
tagaagtggtagaggcacag

SEQ ID NO: 5379 - RNA, 20 nt, synthetic construct
  source 1..20: mol_type = other RNA
atagaagtggtagaggcaca

SEQ ID NO: 5380 - RNA, 20 nt, synthetic construct
  source 1..20: mol_type = other RNA
catagaagtggtagaggcac

SEQ ID NO: 5381 - RNA, 20 nt, synthetic construct
  source 1..20: mol_type = other RNA
tctggtcatagaagtggtag

SEQ ID NO: 5382 - RNA, 20 nt, synthetic construct
  source 1..20: mol_type = other RNA
ggtccatctggtcatagaag

SEQ ID NO: 5383 - RNA, 20 nt, synthetic construct
  source 1..20: mol_type = other RNA
ctaccacttctatgaccaga

SEQ ID NO: 5384 - RNA, 20 nt, synthetic construct
  source 1..20: mol_type = other RNA
cttctccagccaggtccatc

SEQ ID NO: 5385 - RNA, 20 nt, synthetic construct
  source 1..20: mol_type = other RNA
cttctatgaccagatggacc

SEQ ID NO: 5386 - RNA, 20 nt, synthetic construct
  source 1..20: mol_type = other RNA
tatgaccagatggacctggc

SEQ ID NO: 5387 - RNA, 20 nt, synthetic construct
  source 1..20: mol_type = other RNA
caatctcttcttctccagcc

SEQ ID NO: 5388 - RNA, 20 nt, synthetic construct
  source 1..20: mol_type = other RNA
gaagagattgagctctactc

SEQ ID NO: 5389 - RNA, 20 nt, synthetic construct
  source 1..20: mol_type = other RNA
gagattgagctctactcagg

SEQ ID NO: 5390 - RNA, 20 nt, synthetic construct
  source 1..20: mol_type = other RNA
agattgagctctactcaggt

SEQ ID NO: 5391 - RNA, 20 nt, synthetic construct
  source 1..20: mol_type = other RNA
ggaagagaccagagggagga

SEQ ID NO: 5392 - RNA, 20 nt, synthetic construct
  source 1..20: mol_type = other RNA
cggaagagaccagagggagg

SEQ ID NO: 5393 - RNA, 20 nt, synthetic construct
  source 1..20: mol_type = other RNA
caggtgggccctcctccctc

SEQ ID NO: 5394 - RNA, 20 nt, synthetic construct
  source 1..20: mol_type = other RNA
taccggaagagaccagaggg

SEQ ID NO: 5395 - RNA, 20 nt, synthetic construct
  source 1..20: mol_type = other RNA
ggataccggaagagaccaga

SEQ ID NO: 5396 - RNA, 20 nt, synthetic construct
  source 1..20: mol_type = other RNA
gggataccggaagagaccag

SEQ ID NO: 5397 - RNA, 20 nt, synthetic construct
  source 1..20: mol_type = other RNA
ctcctccctctggtctcttc

SEQ ID NO: 5398 - RNA, 20 nt, synthetic construct
  source 1..20: mol_type = other RNA
agctgaggggtgggggatac

SEQ ID NO: 5399 - RNA, 20 nt, synthetic construct
  source 1..20: mol_type = other RNA
tacagcaagctgaggggtgg

SEQ ID NO: 5400 - RNA, 20 nt, synthetic construct
  source 1..20: mol_type = other RNA
ctacagcaagctgaggggtg

SEQ ID NO: 5401 - RNA, 20 nt, synthetic construct
  source 1..20: mol_type = other RNA
tctacagcaagctgaggggt

SEQ ID NO: 5402 - RNA, 20 nt, synthetic construct
  source 1..20: mol_type = other RNA
ctctacagcaagctgagggg

SEQ ID NO: 5403 - RNA, 20 nt, synthetic construct
  source 1..20: mol_type = other RNA
cgtctctacagcaagctgag

SEQ ID NO: 5404 - RNA, 20 nt, synthetic construct
  source 1..20: mol_type = other RNA
ccgtctctacagcaagctga

SEQ ID NO: 5405 - RNA, 20 nt, synthetic construct
  source 1..20: mol_type = other RNA
gccgtctctacagcaagctg

SEQ ID NO: 5406 - RNA, 20 nt, synthetic construct
  source 1..20: mol_type = other RNA
ccctcagcttgctgtagaga

SEQ ID NO: 5407 - RNA, 20 nt, synthetic construct
  source 1..20: mol_type = other RNA
ttgctgtagagacggcaatc

SEQ ID NO: 5408 - RNA, 20 nt, synthetic construct
  source 1..20: mol_type = other RNA
tgctgtagagacggcaatca

SEQ ID NO: 5409 - RNA, 20 nt, synthetic construct
  source 1..20: mol_type = other RNA
gctgtagagacggcaatcag

SEQ ID NO: 5410 - RNA, 20 nt, synthetic construct
  source 1..20: mol_type = other RNA
acggcaatcaggggaaattc

SEQ ID NO: 5411 - RNA, 20 nt, synthetic construct
  source 1..20: mol_type = other RNA
gtggtgctgacgggagggca

SEQ ID NO: 5412 - RNA, 20 nt, synthetic construct
  source 1..20: mol_type = other RNA
cgtggtgctgacgggagggc

SEQ ID NO: 5413 - RNA, 20 nt, synthetic construct
  source 1..20: mol_type = other RNA
tgtccgtggtgctgacggga

SEQ ID NO: 5414 - RNA, 20 nt, synthetic construct
  source 1..20: mol_type = other RNA
ctgtccgtggtgctgacggg

SEQ ID NO: 5415 - RNA, 20 nt, synthetic construct
  source 1..20: mol_type = other RNA
gagctgtccgtggtgctgac

SEQ ID NO: 5416 - RNA, 20 nt, synthetic construct
  source 1..20: mol_type = other RNA
ggagctgtccgtggtgctga

SEQ ID NO: 5417 - RNA, 20 nt, synthetic construct
  source 1..20: mol_type = other RNA
ctgccctcccgtcagcacca

SEQ ID NO: 5418 - RNA, 20 nt, synthetic construct
  source 1..20: mol_type = other RNA
acagacgtgggagctgtccg

SEQ ID NO: 5419 - RNA, 20 nt, synthetic construct
  source 1..20: mol_type = other RNA
agagagcgtcccacagacgt

SEQ ID NO: 5420 - RNA, 20 nt, synthetic construct
  source 1..20: mol_type = other RNA
acggacagctcccacgtctg

SEQ ID NO: 5421 - RNA, 20 nt, synthetic construct
  source 1..20: mol_type = other RNA
cagagagcgtcccacagacg

SEQ ID NO: 5422 - RNA, 20 nt, synthetic construct
  source 1..20: mol_type = other RNA
cggacagctcccacgtctgt

SEQ ID NO: 5423 - RNA, 20 nt, synthetic construct
  source 1..20: mol_type = other RNA
tgtgggacgctctctgcaga

SEQ ID NO: 5424 - RNA, 20 nt, synthetic construct
  source 1..20: mol_type = other RNA
gtgggacgctctctgcagat

SEQ ID NO: 5425 - RNA, 20 nt, synthetic construct
  source 1..20: mol_type = other RNA
tgggacgctctctgcagatg

SEQ ID NO: 5426 - RNA, 20 nt, synthetic construct
  source 1..20: mol_type = other RNA
gggagaggcggggcagggct

SEQ ID NO: 5427 - RNA, 20 nt, synthetic construct
  source 1..20: mol_type = other RNA
agggagaggcggggcagggc

SEQ ID NO: 5428 - RNA, 20 nt, synthetic construct
  source 1..20: mol_type = other RNA
aacgagggagaggcggggca

SEQ ID NO: 5429 - RNA, 20 nt, synthetic construct
  source 1..20: mol_type = other RNA
gaacgagggagaggcggggc

SEQ ID NO: 5430 - RNA, 20 nt, synthetic construct
  source 1..20: mol_type = other RNA
tggggaacgagggagaggcg

SEQ ID NO: 5431 - RNA, 20 nt, synthetic construct
  source 1..20: mol_type = other RNA
gtggggaacgagggagaggc

SEQ ID NO: 5432 - RNA, 20 nt, synthetic construct
  source 1..20: mol_type = other RNA
ggtggggaacgagggagagg

SEQ ID NO: 5433 - RNA, 20 nt, synthetic construct
  source 1..20: mol_type = other RNA
gctggtggggaacgagggag

SEQ ID NO: 5434 - RNA, 20 nt, synthetic construct
  source 1..20: mol_type = other RNA
agagggctggtggggaacga

SEQ ID NO: 5435 - RNA, 20 nt, synthetic construct
  source 1..20: mol_type = other RNA
aagagggctggtggggaacg

SEQ ID NO: 5436 - RNA, 20 nt, synthetic construct
  source 1..20: mol_type = other RNA
ttctggaaagagggctggtg

SEQ ID NO: 5437 - RNA, 20 nt, synthetic construct
  source 1..20: mol_type = other RNA
tttctggaaagagggctggt

SEQ ID NO: 5438 - RNA, 20 nt, synthetic construct
  source 1..20: mol_type = other RNA
atttctggaaagagggctgg

SEQ ID NO: 5439 - RNA, 20 nt, synthetic construct
  source 1..20: mol_type = other RNA
gaaatttctggaaagagggc

SEQ ID NO: 5440 - RNA, 20 nt, synthetic construct
  source 1..20: mol_type = other RNA
gaaggaaatttctggaaaga

SEQ ID NO: 5441 - RNA, 20 nt, synthetic construct
  source 1..20: mol_type = other RNA
agaaggaaatttctggaaag

SEQ ID NO: 5442 - RNA, 20 nt, synthetic construct
  source 1..20: mol_type = other RNA
tggatgaagaaggaaatttc

SEQ ID NO: 5443 - RNA, 20 nt, synthetic construct
  source 1..20: mol_type = other RNA
aaaagtcccttggatgaaga

SEQ ID NO: 5444 - RNA, 20 nt, synthetic construct
  source 1..20: mol_type = other RNA
gaaatttccttcttcatcca

SEQ ID NO: 5445 - RNA, 20 nt, synthetic construct
  source 1..20: mol_type = other RNA
aaatttccttcttcatccaa

SEQ ID NO: 5446 - RNA, 20 nt, synthetic construct
  source 1..20: mol_type = other RNA
ttctgggaggaaaagtccct

SEQ ID NO: 5447 - RNA, 20 nt, synthetic construct
  source 1..20: mol_type = other RNA
tgtctgtgtcgggttctggg

SEQ ID NO: 5448 - RNA, 20 nt, synthetic construct
  source 1..20: mol_type = other RNA
tggtgtctgtgtcgggttct

SEQ ID NO: 5449 - RNA, 20 nt, synthetic construct
  source 1..20: mol_type = other RNA
atggtgtctgtgtcgggttc

SEQ ID NO: 5450 - RNA, 20 nt, synthetic construct
  source 1..20: mol_type = other RNA
cagttgatggtgtctgtgtc

SEQ ID NO: 5451 - RNA, 20 nt, synthetic construct
  source 1..20: mol_type = other RNA
gcagttgatggtgtctgtgt

SEQ ID NO: 5452 - RNA, 20 nt, synthetic construct
  source 1..20: mol_type = other RNA
gctgaactggtcgcagttga

SEQ ID NO: 5453 - RNA, 20 nt, synthetic construct
  source 1..20: mol_type = other RNA
cacacaacagcctgctgaac

SEQ ID NO: 5454 - RNA, 20 nt, synthetic construct
  source 1..20: mol_type = other RNA
tcaactgcgaccagttcagc

SEQ ID NO: 5455 - RNA, 20 nt, synthetic construct
  source 1..20: mol_type = other RNA
cagcaggctgttgtgtgaca

SEQ ID NO: 5456 - RNA, 20 nt, synthetic construct
  source 1..20: mol_type = other RNA
aggctgttgtgtgacatgga

SEQ ID NO: 5457 - RNA, 20 nt, synthetic construct
  source 1..20: mol_type = other RNA
tggaaggtgatgaagagacc

SEQ ID NO: 5458 - RNA, 20 nt, synthetic construct
  source 1..20: mol_type = other RNA
ggaaggtgatgaagagacca

SEQ ID NO: 5459 - RNA, 20 nt, synthetic construct
  source 1..20: mol_type = other RNA
aggtgatgaagagaccaggg

SEQ ID NO: 5460 - RNA, 20 nt, synthetic construct
  source 1..20: mol_type = other RNA
gatattggcataagcctccc

SEQ ID NO: 5461 - RNA, 20 nt, synthetic construct
  source 1..20: mol_type = other RNA
agggaggcttatgccaatat

SEQ ID NO: 5462 - RNA, 20 nt, synthetic construct
  source 1..20: mol_type = other RNA
aggtgcttcctcaccgatat

SEQ ID NO: 5463 - RNA, 20 nt, synthetic construct
  source 1..20: mol_type = other RNA
ggcttatgccaatatcggtg

SEQ ID NO: 5464 - RNA, 20 nt, synthetic construct
  source 1..20: mol_type = other RNA
gattgtccttttctgggctc

SEQ ID NO: 5465 - RNA, 20 nt, synthetic construct
  source 1..20: mol_type = other RNA
gaagcacctgagcccagaaa

SEQ ID NO: 5466 - RNA, 20 nt, synthetic construct
  source 1..20: mol_type = other RNA
gcccttgattgtccttttct

SEQ ID NO: 5467 - RNA, 20 nt, synthetic construct
  source 1..20: mol_type = other RNA
tgcccttgattgtccttttc

SEQ ID NO: 5468 - RNA, 20 nt, synthetic construct
  source 1..20: mol_type = other RNA
agcccagaaaaggacaatca

SEQ ID NO: 5469 - RNA, 20 nt, synthetic construct
  source 1..20: mol_type = other RNA
gcccagaaaaggacaatcaa

SEQ ID NO: 5470 - RNA, 20 nt, synthetic construct
  source 1..20: mol_type = other RNA
gaatgggtgatattgacaag

SEQ ID NO: 5471 - RNA, 20 nt, synthetic construct
  source 1..20: mol_type = other RNA
tgacgtggctcatgatgaat

SEQ ID NO: 5472 - RNA, 20 nt, synthetic construct
  source 1..20: mol_type = other RNA
ctgacgtggctcatgatgaa

SEQ ID NO: 5473 - RNA, 20 nt, synthetic construct
  source 1..20: mol_type = other RNA
tctgtgggaggggactgacg

SEQ ID NO: 5474 - RNA, 20 nt, synthetic construct
  source 1..20: mol_type = other RNA
tgcaatgatttctgtgggag

SEQ ID NO: 5475 - RNA, 20 nt, synthetic construct
  source 1..20: mol_type = other RNA
ttgcaatgatttctgtggga

SEQ ID NO: 5476 - RNA, 20 nt, synthetic construct
  source 1..20: mol_type = other RNA
cttgcaatgatttctgtggg

SEQ ID NO: 5477 - RNA, 20 nt, synthetic construct
  source 1..20: mol_type = other RNA
ccccttgcaatgatttctgt

SEQ ID NO: 5478 - RNA, 20 nt, synthetic construct
  source 1..20: mol_type = other RNA
cccccttgcaatgatttctg

SEQ ID NO: 5479 - RNA, 20 nt, synthetic construct
  source 1..20: mol_type = other RNA
ctcccacagaaatcattgca

SEQ ID NO: 5480 - RNA, 20 nt, synthetic construct
  source 1..20: mol_type = other RNA
tcccacagaaatcattgcaa

SEQ ID NO: 5481 - RNA, 20 nt, synthetic construct
  source 1..20: mol_type = other RNA
cccacagaaatcattgcaag

SEQ ID NO: 5482 - RNA, 20 nt, synthetic construct
  source 1..20: mol_type = other RNA
ccacagaaatcattgcaagg

SEQ ID NO: 5483 - RNA, 20 nt, synthetic construct
  source 1..20: mol_type = other RNA
aaatcattgcaagggggatg

SEQ ID NO: 5484 - RNA, 20 nt, synthetic construct
  source 1..20: mol_type = other RNA
gcaagggggatgcggagcaa

SEQ ID NO: 5485 - RNA, 20 nt, synthetic construct
  source 1..20: mol_type = other RNA
gggggatgcggagcaatggc

SEQ ID NO: 5486 - RNA, 20 nt, synthetic construct
  source 1..20: mol_type = other RNA
ggatgcggagcaatggctgg

SEQ ID NO: 5487 - RNA, 20 nt, synthetic construct
  source 1..20: mol_type = other RNA
cggagcaatggctggaggaa

SEQ ID NO: 5488 - RNA, 20 nt, synthetic construct
  source 1..20: mol_type = other RNA
gctggaggaacggagactcc

SEQ ID NO: 5489 - RNA, 20 nt, synthetic construct
  source 1..20: mol_type = other RNA
ctggaggaacggagactcca

SEQ ID NO: 5490 - RNA, 20 nt, synthetic construct
  source 1..20: mol_type = other RNA
tccatctcccctctcttccc

SEQ ID NO: 5491 - RNA, 20 nt, synthetic construct
  source 1..20: mol_type = other RNA
acggagactccagggaagag

SEQ ID NO: 5492 - RNA, 20 nt, synthetic construct
  source 1..20: mol_type = other RNA
cggagactccagggaagaga

SEQ ID NO: 5493 - RNA, 20 nt, synthetic construct
  source 1..20: mol_type = other RNA
ggagactccagggaagagag

SEQ ID NO: 5494 - RNA, 20 nt, synthetic construct
  source 1..20: mol_type = other RNA
tccagggaagagaggggaga

SEQ ID NO: 5495 - RNA, 20 nt, synthetic construct
  source 1..20: mol_type = other RNA
agggaagagaggggagatgg

SEQ ID NO: 5496 - RNA, 20 nt, synthetic construct
  source 1..20: mol_type = other RNA
agaggggagatggaggccag

SEQ ID NO: 5497 - RNA, 20 nt, synthetic construct
  source 1..20: mol_type = other RNA
gaggggagatggaggccagt

SEQ ID NO: 5498 - RNA, 20 nt, synthetic construct
  source 1..20: mol_type = other RNA
aggggagatggaggccagtg

SEQ ID NO: 5499 - RNA, 20 nt, synthetic construct
  source 1..20: mol_type = other RNA
ggggagatggaggccagtgg

SEQ ID NO: 5500 - RNA, 20 nt, synthetic construct
  source 1..20: mol_type = other RNA
tggaggccagtgggggaaat

SEQ ID NO: 5501 - RNA, 20 nt, synthetic construct
  source 1..20: mol_type = other RNA
atgagattttgttttcttgg

SEQ ID NO: 5502 - RNA, 20 nt, synthetic construct
  source 1..20: mol_type = other RNA
aacatgagattttgttttct

SEQ ID NO: 5503 - RNA, 20 nt, synthetic construct
  source 1..20: mol_type = other RNA
gcgtatagaaatggaggtgg

SEQ ID NO: 5504 - RNA, 20 nt, synthetic construct
  source 1..20: mol_type = other RNA
aatgcgtatagaaatggagg

SEQ ID NO: 5505 - RNA, 20 nt, synthetic construct
  source 1..20: mol_type = other RNA
agaaatgcgtatagaaatgg

SEQ ID NO: 5506 - RNA, 20 nt, synthetic construct
  source 1..20: mol_type = other RNA
agcagaaatgcgtatagaaa

SEQ ID NO: 5507 - RNA, 20 nt, synthetic construct
  source 1..20: mol_type = other RNA
tatgggctttgtagaaagga

SEQ ID NO: 5508 - RNA, 20 nt, synthetic construct
  source 1..20: mol_type = other RNA
atggtatgggctttgtagaa

SEQ ID NO: 5509 - RNA, 20 nt, synthetic construct
  source 1..20: mol_type = other RNA
gggaaaggggtgtatggtat

SEQ ID NO: 5510 - RNA, 20 nt, synthetic construct
  source 1..20: mol_type = other RNA
agggaaaggggtgtatggta

SEQ ID NO: 5511 - RNA, 20 nt, synthetic construct
  source 1..20: mol_type = other RNA
ggaaaagggaaaggggtgta

SEQ ID NO: 5512 - RNA, 20 nt, synthetic construct
  source 1..20: mol_type = other RNA
gctgggaggaaaagggaaag

SEQ ID NO: 5513 - RNA, 20 nt, synthetic construct
  source 1..20: mol_type = other RNA
agctgggaggaaaagggaaa

SEQ ID NO: 5514 - RNA, 20 nt, synthetic construct
  source 1..20: mol_type = other RNA
gagctgggaggaaaagggaa

SEQ ID NO: 5515 - RNA, 20 nt, synthetic construct
  source 1..20: mol_type = other RNA
ctaaggagctgggaggaaaa

SEQ ID NO: 5516 - RNA, 20 nt, synthetic construct
  source 1..20: mol_type = other RNA
gctaaggagctgggaggaaa

SEQ ID NO: 5517 - RNA, 20 nt, synthetic construct
  source 1..20: mol_type = other RNA
agcttggctaaggagctggg

SEQ ID NO: 5518 - RNA, 20 nt, synthetic construct
  source 1..20: mol_type = other RNA
agtagcttggctaaggagct

SEQ ID NO: 5519 - RNA, 20 nt, synthetic construct
  source 1..20: mol_type = other RNA
gagtagcttggctaaggagc

SEQ ID NO: 5520 - RNA, 20 nt, synthetic construct
  source 1..20: mol_type = other RNA
atactagagtagcttggcta

SEQ ID NO: 5521 - RNA, 20 nt, synthetic construct
  source 1..20: mol_type = other RNA
ttacaaatactagagtagct

SEQ ID NO: 5522 - RNA, 20 nt, synthetic construct
  source 1..20: mol_type = other RNA
ttgtaataactagcatttac

SEQ ID NO: 5523 - RNA, 20 nt, synthetic construct
  source 1..20: mol_type = other RNA
ggattccagatgataatgta

SEQ ID NO: 5524 - RNA, 20 nt, synthetic construct
  source 1..20: mol_type = other RNA
gctgtccatacattatcatc

SEQ ID NO: 5525 - RNA, 20 nt, synthetic construct
  source 1..20: mol_type = other RNA
gtatttcctttgttgttgta

SEQ ID NO: 5526 - RNA, 20 nt, synthetic construct
  source 1..20: mol_type = other RNA
tggaatccttacaacaacaa

SEQ ID NO: 5527 - RNA, 20 nt, synthetic construct
  source 1..20: mol_type = other RNA
gtttctgtcttttacaaatg

SEQ ID NO: 5528 - RNA, 20 nt, synthetic construct
  source 1..20: mol_type = other RNA
ttttacaaatgaggaaattg

SEQ ID NO: 5529 - RNA, 20 nt, synthetic construct
  source 1..20: mol_type = other RNA
gaggaaattgaggtttagag

SEQ ID NO: 5530 - RNA, 20 nt, synthetic construct
  source 1..20: mol_type = other RNA
tctctaatgcaaacttgggt

SEQ ID NO: 5531 - RNA, 20 nt, synthetic construct
  source 1..20: mol_type = other RNA
actatctctaatgcaaactt

SEQ ID NO: 5532 - RNA, 20 nt, synthetic construct
  source 1..20: mol_type = other RNA
tactatctctaatgcaaact

SEQ ID NO: 5533 - RNA, 20 nt, synthetic construct
  source 1..20: mol_type = other RNA
cagatctgaaattctaacct

SEQ ID NO: 5534 - RNA, 20 nt, synthetic construct
  source 1..20: mol_type = other RNA
ctttgaaacgagaaagacct

SEQ ID NO: 5535 - RNA, 20 nt, synthetic construct
  source 1..20: mol_type = other RNA
tctttttttgtggttaaaaa

SEQ ID NO: 5536 - RNA, 20 nt, synthetic construct
  source 1..20: mol_type = other RNA
ccagacactttctttttttg

SEQ ID NO: 5537 - RNA, 20 nt, synthetic construct
  source 1..20: mol_type = other RNA
ccacaaaaaaagaaagtgtc

SEQ ID NO: 5538 - RNA, 20 nt, synthetic construct
  source 1..20: mol_type = other RNA
cacaaaaaaagaaagtgtct

SEQ ID NO: 5539 - RNA, 20 nt, synthetic construct
  source 1..20: mol_type = other RNA
acaaaaaaagaaagtgtctg

SEQ ID NO: 5540 - RNA, 20 nt, synthetic construct
  source 1..20: mol_type = other RNA
aaaaagaaagtgtctggggt

SEQ ID NO: 5541 - RNA, 20 nt, synthetic construct
  source 1..20: mol_type = other RNA
tggggttggaagatttgcta

SEQ ID NO: 5542 - RNA, 20 nt, synthetic construct
  source 1..20: mol_type = other RNA
gaaagctgtagctcttctta

SEQ ID NO: 5543 - RNA, 20 nt, synthetic construct
  source 1..20: mol_type = other RNA
agagctacagctttcagaca

SEQ ID NO: 5544 - RNA, 20 nt, synthetic construct
  source 1..20: mol_type = other RNA
gagctacagctttcagacaa

SEQ ID NO: 5545 - RNA, 20 nt, synthetic construct
  source 1..20: mol_type = other RNA
tacagctttcagacaagggc

SEQ ID NO: 5546 - RNA, 20 nt, synthetic construct
  source 1..20: mol_type = other RNA
tcagacaagggcaggactct

SEQ ID NO: 5547 - RNA, 20 nt, synthetic construct
  source 1..20: mol_type = other RNA
cagacaagggcaggactctt

SEQ ID NO: 5548 - RNA, 20 nt, synthetic construct
  source 1..20: mol_type = other RNA
agacaagggcaggactcttg

SEQ ID NO: 5549 - RNA, 20 nt, synthetic construct
  source 1..20: mol_type = other RNA
agggcaggactcttggggag

SEQ ID NO: 5550 - RNA, 20 nt, synthetic construct
  source 1..20: mol_type = other RNA
gcaggactcttggggagagg

SEQ ID NO: 5551 - RNA, 20 nt, synthetic construct
  source 1..20: mol_type = other RNA
ggactcttggggagaggtgg

SEQ ID NO: 5552 - RNA, 20 nt, synthetic construct
  source 1..20: mol_type = other RNA
ctcttggggagaggtggtgg

SEQ ID NO: 5553 - RNA, 20 nt, synthetic construct
  source 1..20: mol_type = other RNA
ggtggtggtgttgctgctag

SEQ ID NO: 5554 - RNA, 20 nt, synthetic construct
  source 1..20: mol_type = other RNA
gctgctagtggtttgttttt

SEQ ID NO: 5555 - RNA, 20 nt, synthetic construct
  source 1..20: mol_type = other RNA
ctgctagtggtttgtttttt

SEQ ID NO: 5556 - RNA, 20 nt, synthetic construct
  source 1..20: mol_type = other RNA
tgctagtggtttgttttttg

SEQ ID NO: 5557 - RNA, 20 nt, synthetic construct
  source 1..20: mol_type = other RNA
gctagtggtttgttttttgg

SEQ ID NO: 5558 - RNA, 20 nt, synthetic construct
  source 1..20: mol_type = other RNA
tgttttttgggggagagacg

SEQ ID NO: 5559 - RNA, 20 nt, synthetic construct
  source 1..20: mol_type = other RNA
gttttttgggggagagacgt

SEQ ID NO: 5560 - RNA, 20 nt, synthetic construct
  source 1..20: mol_type = other RNA
gtatgaggtggtggtgatgc

SEQ ID NO: 5561 - RNA, 20 nt, synthetic construct
  source 1..20: mol_type = other RNA
ataggctctgtatgaggtgg

SEQ ID NO: 5562 - RNA, 20 nt, synthetic construct
  source 1..20: mol_type = other RNA
aacataggctctgtatgagg

SEQ ID NO: 5563 - RNA, 20 nt, synthetic construct
  source 1..20: mol_type = other RNA
ttcaacataggctctgtatg

SEQ ID NO: 5564 - RNA, 20 nt, synthetic construct
  source 1..20: mol_type = other RNA
acttttttctatttcaacat

SEQ ID NO: 5565 - RNA, 20 nt, synthetic construct
  source 1..20: mol_type = other RNA
tatgttgaaatagaaaaaag

SEQ ID NO: 5566 - RNA, 20 nt, synthetic construct
  source 1..20: mol_type = other RNA
agaaaaaagtggcctttttc

SEQ ID NO: 5567 - RNA, 20 nt, synthetic construct
  source 1..20: mol_type = other RNA
gggctgcatcctccagaaaa

SEQ ID NO: 5568 - RNA, 20 nt, synthetic construct
  source 1..20: mol_type = other RNA
aaaaagtggcctttttctgg

SEQ ID NO: 5569 - RNA, 20 nt, synthetic construct
  source 1..20: mol_type = other RNA
tggaggatgcagcccctacc

SEQ ID NO: 5570 - RNA, 20 nt, synthetic construct
  source 1..20: mol_type = other RNA
aagcagttacttcctggtag

SEQ ID NO: 5571 - RNA, 20 nt, synthetic construct
  source 1..20: mol_type = other RNA
caagcagttacttcctggta

SEQ ID NO: 5572 - RNA, 20 nt, synthetic construct
  source 1..20: mol_type = other RNA
ccaagcagttacttcctggt

SEQ ID NO: 5573 - RNA, 20 nt, synthetic construct
  source 1..20: mol_type = other RNA
ctagccaagcagttacttcc

SEQ ID NO: 5574 - RNA, 20 nt, synthetic construct
  source 1..20: mol_type = other RNA
cctaccaggaagtaactgct

SEQ ID NO: 5575 - RNA, 20 nt, synthetic construct
  source 1..20: mol_type = other RNA
ttggctagcaaagtgcaagc

SEQ ID NO: 5576 - RNA, 20 nt, synthetic construct
  source 1..20: mol_type = other RNA
ggaaaatgggggcaggactc

SEQ ID NO: 5577 - RNA, 20 nt, synthetic construct
  source 1..20: mol_type = other RNA
ccaacaaggaaaatgggggc

SEQ ID NO: 5578 - RNA, 20 nt, synthetic construct
  source 1..20: mol_type = other RNA
caagccaacaaggaaaatgg

SEQ ID NO: 5579 - RNA, 20 nt, synthetic construct
  source 1..20: mol_type = other RNA
ccaagccaacaaggaaaatg

SEQ ID NO: 5580 - RNA, 20 nt, synthetic construct
  source 1..20: mol_type = other RNA
cccaagccaacaaggaaaat

SEQ ID NO: 5581 - RNA, 20 nt, synthetic construct
  source 1..20: mol_type = other RNA
gcccaagccaacaaggaaaa

SEQ ID NO: 5582 - RNA, 20 nt, synthetic construct
  source 1..20: mol_type = other RNA
cctgcccccattttccttgt

SEQ ID NO: 5583 - RNA, 20 nt, synthetic construct
  source 1..20: mol_type = other RNA
cacaggtgcccaagccaaca

SEQ ID NO: 5584 - RNA, 20 nt, synthetic construct
  source 1..20: mol_type = other RNA
ccccattttccttgttggct

SEQ ID NO: 5585 - RNA, 20 nt, synthetic construct
  source 1..20: mol_type = other RNA
cccattttccttgttggctt

SEQ ID NO: 5586 - RNA, 20 nt, synthetic construct
  source 1..20: mol_type = other RNA
gcaggttgttcactgcacac

SEQ ID NO: 5587 - RNA, 20 nt, synthetic construct
  source 1..20: mol_type = other RNA
accactaagaagagttttgc

SEQ ID NO: 5588 - RNA, 20 nt, synthetic construct
  source 1..20: mol_type = other RNA
acctgcaaaactcttcttag

SEQ ID NO: 5589 - RNA, 20 nt, synthetic construct
  source 1..20: mol_type = other RNA
gctgctgttcctgggttggc

SEQ ID NO: 5590 - RNA, 20 nt, synthetic construct
  source 1..20: mol_type = other RNA
ggtcttcttcctgccaaccc

SEQ ID NO: 5591 - RNA, 20 nt, synthetic construct
  source 1..20: mol_type = other RNA
gaatgctgctgttcctgggt

SEQ ID NO: 5592 - RNA, 20 nt, synthetic construct
  source 1..20: mol_type = other RNA
tgctgaatgctgctgttcct

SEQ ID NO: 5593 - RNA, 20 nt, synthetic construct
  source 1..20: mol_type = other RNA
ctgctgaatgctgctgttcc

SEQ ID NO: 5594 - RNA, 20 nt, synthetic construct
  source 1..20: mol_type = other RNA
ttctgtgcttgatccaaatg

SEQ ID NO: 5595 - RNA, 20 nt, synthetic construct
  source 1..20: mol_type = other RNA
ggggaaaaattggccacatt

SEQ ID NO: 5596 - RNA, 20 nt, synthetic construct
  source 1..20: mol_type = other RNA
actgtgctctggggaaaaat

SEQ ID NO: 5597 - RNA, 20 nt, synthetic construct
  source 1..20: mol_type = other RNA
tttcaatacactgtgctctg

SEQ ID NO: 5598 - RNA, 20 nt, synthetic construct
  source 1..20: mol_type = other RNA
ttttcaatacactgtgctct

SEQ ID NO: 5599 - RNA, 20 nt, synthetic construct
  source 1..20: mol_type = other RNA
attttcaatacactgtgctc

SEQ ID NO: 5600 - RNA, 20 nt, synthetic construct
  source 1..20: mol_type = other RNA
gtgtattgaaaatcatacca

SEQ ID NO: 5601 - RNA, 20 nt, synthetic construct
  source 1..20: mol_type = other RNA
gtcccctccattttcttcct

SEQ ID NO: 5602 - RNA, 20 nt, synthetic construct
  source 1..20: mol_type = other RNA
aatcataccaaggaagaaaa

SEQ ID NO: 5603 - RNA, 20 nt, synthetic construct
  source 1..20: mol_type = other RNA
cataccaaggaagaaaatgg

SEQ ID NO: 5604 - RNA, 20 nt, synthetic construct
  source 1..20: mol_type = other RNA
ataccaaggaagaaaatgga

SEQ ID NO: 5605 - RNA, 20 nt, synthetic construct
  source 1..20: mol_type = other RNA
taccaaggaagaaaatggag

SEQ ID NO: 5606 - RNA, 20 nt, synthetic construct
  source 1..20: mol_type = other RNA
tgtaaatccccaggaaggga

SEQ ID NO: 5607 - RNA, 20 nt, synthetic construct
  source 1..20: mol_type = other RNA
tgactgcttccttcccttcc

SEQ ID NO: 5608 - RNA, 20 nt, synthetic construct
  source 1..20: mol_type = other RNA
gactgcttccttcccttcct

SEQ ID NO: 5609 - RNA, 20 nt, synthetic construct
  source 1..20: mol_type = other RNA
actgcttccttcccttcctg

SEQ ID NO: 5610 - RNA, 20 nt, synthetic construct
  source 1..20: mol_type = other RNA
cccatgtaaatccccaggaa

SEQ ID NO: 5611 - RNA, 20 nt, synthetic construct
  source 1..20: mol_type = other RNA
ccccatgtaaatccccagga

SEQ ID NO: 5612 - RNA, 20 nt, synthetic construct
  source 1..20: mol_type = other RNA
cttcccccatgtaaatcccc

SEQ ID NO: 5613 - RNA, 20 nt, synthetic construct
  source 1..20: mol_type = other RNA
tcccttcctggggatttaca

SEQ ID NO: 5614 - RNA, 20 nt, synthetic construct
  source 1..20: mol_type = other RNA
cccttcctggggatttacat

SEQ ID NO: 5615 - RNA, 20 nt, synthetic construct
  source 1..20: mol_type = other RNA
ccttcctggggatttacatg

SEQ ID NO: 5616 - RNA, 20 nt, synthetic construct
  source 1..20: mol_type = other RNA
cttcctggggatttacatgg

SEQ ID NO: 5617 - RNA, 20 nt, synthetic construct
  source 1..20: mol_type = other RNA
atgggggaagcagaagtgat

SEQ ID NO: 5618 - RNA, 20 nt, synthetic construct
  source 1..20: mol_type = other RNA
tgggggaagcagaagtgatt

SEQ ID NO: 5619 - RNA, 20 nt, synthetic construct
  source 1..20: mol_type = other RNA
gggggaagcagaagtgattg

SEQ ID NO: 5620 - RNA, 20 nt, synthetic construct
  source 1..20: mol_type = other RNA
agcagaagtgattggggctg

SEQ ID NO: 5621 - RNA, 20 nt, synthetic construct
  source 1..20: mol_type = other RNA
cattcacatttcctcacaac

SEQ ID NO: 5622 - RNA, 20 nt, synthetic construct
  source 1..20: mol_type = other RNA
aatgactgcctccagttgtg

SEQ ID NO: 5623 - RNA, 20 nt, synthetic construct
  source 1..20: mol_type = other RNA
tcacatttcctcacaactgg

SEQ ID NO: 5624 - RNA, 20 nt, synthetic construct
  source 1..20: mol_type = other RNA
acaactggaggcagtcatta

SEQ ID NO: 5625 - RNA, 20 nt, synthetic construct
  source 1..20: mol_type = other RNA
ggaggcagtcattaaggatt

SEQ ID NO: 5626 - RNA, 20 nt, synthetic construct
  source 1..20: mol_type = other RNA
gaggcagtcattaaggattt

SEQ ID NO: 5627 - RNA, 20 nt, synthetic construct
  source 1..20: mol_type = other RNA
taaggatttgggcatgtcat

SEQ ID NO: 5628 - RNA, 20 nt, synthetic construct
  source 1..20: mol_type = other RNA
tttgggcatgtcataggatt

SEQ ID NO: 5629 - RNA, 20 nt, synthetic construct
  source 1..20: mol_type = other RNA
ttgggcatgtcataggattt

SEQ ID NO: 5630 - RNA, 20 nt, synthetic construct
  source 1..20: mol_type = other RNA
tgtggagatgccactaaggg

SEQ ID NO: 5631 - RNA, 20 nt, synthetic construct
  source 1..20: mol_type = other RNA
gtgtttttctccccccttag

SEQ ID NO: 5632 - RNA, 20 nt, synthetic construct
  source 1..20: mol_type = other RNA
ctgtggagatgccactaagg

SEQ ID NO: 5633 - RNA, 20 nt, synthetic construct
  source 1..20: mol_type = other RNA
cctgtggagatgccactaag

SEQ ID NO: 5634 - RNA, 20 nt, synthetic construct
  source 1..20: mol_type = other RNA
gcctgtggagatgccactaa

SEQ ID NO: 5635 - RNA, 20 nt, synthetic construct
  source 1..20: mol_type = other RNA
tgcctgtggagatgccacta

SEQ ID NO: 5636 - RNA, 20 nt, synthetic construct
  source 1..20: mol_type = other RNA
ccccttagtggcatctccac

SEQ ID NO: 5637 - RNA, 20 nt, synthetic construct
  source 1..20: mol_type = other RNA
tagacagctttcgctgcctg

SEQ ID NO: 5638 - RNA, 20 nt, synthetic construct
  source 1..20: mol_type = other RNA
cgaaagctgtctaagcaaat

SEQ ID NO: 5639 - RNA, 20 nt, synthetic construct
  source 1..20: mol_type = other RNA
gctgtctaagcaaataggtg

SEQ ID NO: 5640 - RNA, 20 nt, synthetic construct
  source 1..20: mol_type = other RNA
ttgttttaagcaacaaaaaa

SEQ ID NO: 5641 - RNA, 20 nt, synthetic construct
  source 1..20: mol_type = other RNA
tttataaattactcagtgtc

SEQ ID NO: 5642 - RNA, 20 nt, synthetic construct
  source 1..20: mol_type = other RNA
aaaaatatttcttacagtta

SEQ ID NO: 5643 - RNA, 20 nt, synthetic construct
  source 1..20: mol_type = other RNA
aatatttcttacagttatgg

SEQ ID NO: 5644 - RNA, 20 nt, synthetic construct
  source 1..20: mol_type = other RNA
tatggaggctgagaagtcca

SEQ ID NO: 5645 - RNA, 20 nt, synthetic construct
  source 1..20: mol_type = other RNA
aggctgagaagtccaaggtt

SEQ ID NO: 5646 - RNA, 20 nt, synthetic construct
  source 1..20: mol_type = other RNA
ggctgagaagtccaaggtta

SEQ ID NO: 5647 - RNA, 20 nt, synthetic construct
  source 1..20: mol_type = other RNA
ccagatgcagcccctaacct

SEQ ID NO: 5648 - RNA, 20 nt, synthetic construct
  source 1..20: mol_type = other RNA
gctgagaagtccaaggttag

SEQ ID NO: 5649 - RNA, 20 nt, synthetic construct
  source 1..20: mol_type = other RNA
ccaaggttaggggctgcatc

SEQ ID NO: 5650 - RNA, 20 nt, synthetic construct
  source 1..20: mol_type = other RNA
gttaggggctgcatctggtg

SEQ ID NO: 5651 - RNA, 20 nt, synthetic construct
  source 1..20: mol_type = other RNA
ttaggggctgcatctggtga

SEQ ID NO: 5652 - RNA, 20 nt, synthetic construct
  source 1..20: mol_type = other RNA
tctggtgagggccttcttac

SEQ ID NO: 5653 - RNA, 20 nt, synthetic construct
  source 1..20: mol_type = other RNA
gagagtcctcaccagtaaga

SEQ ID NO: 5654 - RNA, 20 nt, synthetic construct
  source 1..20: mol_type = other RNA
tgagggccttcttactggtg

SEQ ID NO: 5655 - RNA, 20 nt, synthetic construct
  source 1..20: mol_type = other RNA
ggactctctgcagagtccca

SEQ ID NO: 5656 - RNA, 20 nt, synthetic construct
  source 1..20: mol_type = other RNA
gtgatgccccacactgcctt

SEQ ID NO: 5657 - RNA, 20 nt, synthetic construct
  source 1..20: mol_type = other RNA
cgtgatgccccacactgcct

SEQ ID NO: 5658 - RNA, 20 nt, synthetic construct
  source 1..20: mol_type = other RNA
tgcagagtcccaaggcagtg

SEQ ID NO: 5659 - RNA, 20 nt, synthetic construct
  source 1..20: mol_type = other RNA
gcagagtcccaaggcagtgt

SEQ ID NO: 5660 - RNA, 20 nt, synthetic construct
  source 1..20: mol_type = other RNA
cagagtcccaaggcagtgtg

SEQ ID NO: 5661 - RNA, 20 nt, synthetic construct
  source 1..20: mol_type = other RNA
aggcagtgtggggcatcacg

SEQ ID NO: 5662 - RNA, 20 nt, synthetic construct
  source 1..20: mol_type = other RNA
gtggggcatcacgaggcaag

SEQ ID NO: 5663 - RNA, 20 nt, synthetic construct
  source 1..20: mol_type = other RNA
catcacgaggcaagaggttt

SEQ ID NO: 5664 - RNA, 20 nt, synthetic construct
  source 1..20: mol_type = other RNA
actagtggttttatgagaag

SEQ ID NO: 5665 - RNA, 20 nt, synthetic construct
  source 1..20: mol_type = other RNA
tgtcgtgggagtaagactag

SEQ ID NO: 5666 - RNA, 20 nt, synthetic construct
  source 1..20: mol_type = other RNA
ataagttaatgggttgtcgt

SEQ ID NO: 5667 - RNA, 20 nt, synthetic construct
  source 1..20: mol_type = other RNA
aataagttaatgggttgtcg

SEQ ID NO: 5668 - RNA, 20 nt, synthetic construct
  source 1..20: mol_type = other RNA
aaacaggttaataagttaat

SEQ ID NO: 5669 - RNA, 20 nt, synthetic construct
  source 1..20: mol_type = other RNA
taaacaggttaataagttaa

SEQ ID NO: 5670 - RNA, 20 nt, synthetic construct
  source 1..20: mol_type = other RNA
tcatggattagtggataaac

SEQ ID NO: 5671 - RNA, 20 nt, synthetic construct
  source 1..20: mol_type = other RNA
ttaatccgttcatggattag

SEQ ID NO: 5672 - RNA, 20 nt, synthetic construct
  source 1..20: mol_type = other RNA
tttatccactaatccatgaa

SEQ ID NO: 5673 - RNA, 20 nt, synthetic construct
  source 1..20: mol_type = other RNA
tgaatgggttaatccgttca

SEQ ID NO: 5674 - RNA, 20 nt, synthetic construct
  source 1..20: mol_type = other RNA
ggggcttttccttgatgaat

SEQ ID NO: 5675 - RNA, 20 nt, synthetic construct
  source 1..20: mol_type = other RNA
tggggcttttccttgatgaa

SEQ ID NO: 5676 - RNA, 20 nt, synthetic construct
  source 1..20: mol_type = other RNA
acggattaacccattcatca

SEQ ID NO: 5677 - RNA, 20 nt, synthetic construct
  source 1..20: mol_type = other RNA
gggcctttaagaggtgactg

SEQ ID NO: 5678 - RNA, 20 nt, synthetic construct
  source 1..20: mol_type = other RNA
ggggcctttaagaggtgact

SEQ ID NO: 5679 - RNA, 20 nt, synthetic construct
  source 1..20: mol_type = other RNA
tggggcctttaagaggtgac

SEQ ID NO: 5680 - RNA, 20 nt, synthetic construct
  source 1..20: mol_type = other RNA
aagccccagtcacctcttaa

SEQ ID NO: 5681 - RNA, 20 nt, synthetic construct
  source 1..20: mol_type = other RNA
tgagaggtggggcctttaag

SEQ ID NO: 5682 - RNA, 20 nt, synthetic construct
  source 1..20: mol_type = other RNA
tgtggcagtattgagaggtg

SEQ ID NO: 5683 - RNA, 20 nt, synthetic construct
  source 1..20: mol_type = other RNA
atgtggcagtattgagaggt

SEQ ID NO: 5684 - RNA, 20 nt, synthetic construct
  source 1..20: mol_type = other RNA
tatgtggcagtattgagagg

SEQ ID NO: 5685 - RNA, 20 nt, synthetic construct
  source 1..20: mol_type = other RNA
ccctatgtggcagtattgag

SEQ ID NO: 5686 - RNA, 20 nt, synthetic construct
  source 1..20: mol_type = other RNA
acctctcaatactgccacat

SEQ ID NO: 5687 - RNA, 20 nt, synthetic construct
  source 1..20: mol_type = other RNA
cctctcaatactgccacata

SEQ ID NO: 5688 - RNA, 20 nt, synthetic construct
  source 1..20: mol_type = other RNA
ctctcaatactgccacatag

SEQ ID NO: 5689 - RNA, 20 nt, synthetic construct
  source 1..20: mol_type = other RNA
tataaatgtaatcccctatg

SEQ ID NO: 5690 - RNA, 20 nt, synthetic construct
  source 1..20: mol_type = other RNA
ttacatttatacatgagttt

SEQ ID NO: 5691 - RNA, 20 nt, synthetic construct
  source 1..20: mol_type = other RNA
acaaacattcacgtcataac

SEQ ID NO: 5692 - RNA, 20 nt, synthetic construct
  source 1..20: mol_type = other RNA
cagacttgaggagcagactt

SEQ ID NO: 5693 - RNA, 20 nt, synthetic construct
  source 1..20: mol_type = other RNA
acagacttgaggagcagact

SEQ ID NO: 5694 - RNA, 20 nt, synthetic construct
  source 1..20: mol_type = other RNA
agagaaaacccacagacttg

SEQ ID NO: 5695 - RNA, 20 nt, synthetic construct
  source 1..20: mol_type = other RNA
aagtctgctcctcaagtctg

SEQ ID NO: 5696 - RNA, 20 nt, synthetic construct
  source 1..20: mol_type = other RNA
agtctgctcctcaagtctgt

SEQ ID NO: 5697 - RNA, 20 nt, synthetic construct
  source 1..20: mol_type = other RNA
gtgggttttctctctgcttc

SEQ ID NO: 5698 - RNA, 20 nt, synthetic construct
  source 1..20: mol_type = other RNA
gttttctctctgcttctgga

SEQ ID NO: 5699 - RNA, 20 nt, synthetic construct
  source 1..20: mol_type = other RNA
gcttctggaaggtgaagccc

SEQ ID NO: 5700 - RNA, 20 nt, synthetic construct
  source 1..20: mol_type = other RNA
tggaaggtgaagcccaggcc

SEQ ID NO: 5701 - RNA, 20 nt, synthetic construct
  source 1..20: mol_type = other RNA
ggaaggtgaagcccaggcct

SEQ ID NO: 5702 - RNA, 20 nt, synthetic construct
  source 1..20: mol_type = other RNA
aagaatacttgcccaggcct

SEQ ID NO: 5703 - RNA, 20 nt, synthetic construct
  source 1..20: mol_type = other RNA
aaagaatacttgcccaggcc

SEQ ID NO: 5704 - RNA, 20 nt, synthetic construct
  source 1..20: mol_type = other RNA
ctgcaaaagaatacttgccc

SEQ ID NO: 5705 - RNA, 20 nt, synthetic construct
  source 1..20: mol_type = other RNA
agaagctaaggtcatatttc

SEQ ID NO: 5706 - RNA, 20 nt, synthetic construct
  source 1..20: mol_type = other RNA
ttttacacatttagaagcta

SEQ ID NO: 5707 - RNA, 20 nt, synthetic construct
  source 1..20: mol_type = other RNA
tagcttctaaatgtgtaaaa

SEQ ID NO: 5708 - RNA, 20 nt, synthetic construct
  source 1..20: mol_type = other RNA
tacaaccatcccgtgatggt

SEQ ID NO: 5709 - RNA, 20 nt, synthetic construct
  source 1..20: mol_type = other RNA
aataatcacacccaccatca

SEQ ID NO: 5710 - RNA, 20 nt, synthetic construct
  source 1..20: mol_type = other RNA
ttacaaccatcccgtgatgg

SEQ ID NO: 5711 - RNA, 20 nt, synthetic construct
  source 1..20: mol_type = other RNA
ataatcacacccaccatcac

SEQ ID NO: 5712 - RNA, 20 nt, synthetic construct
  source 1..20: mol_type = other RNA
gtcttacaaccatcccgtga

SEQ ID NO: 5713 - RNA, 20 nt, synthetic construct
  source 1..20: mol_type = other RNA
tcacacccaccatcacggga

SEQ ID NO: 5714 - RNA, 20 nt, synthetic construct
  source 1..20: mol_type = other RNA
atgtgtaaagcatttagaaa

SEQ ID NO: 5715 - RNA, 20 nt, synthetic construct
  source 1..20: mol_type = other RNA
gtaagcattcagtagatgtt

SEQ ID NO: 5716 - RNA, 20 nt, synthetic construct
  source 1..20: mol_type = other RNA
taatgataacggtggttgtg

SEQ ID NO: 5717 - RNA, 20 nt, synthetic construct
  source 1..20: mol_type = other RNA
ataatgataacggtggttgt

SEQ ID NO: 5718 - RNA, 20 nt, synthetic construct
  source 1..20: mol_type = other RNA
aataatgataacggtggttg

SEQ ID NO: 5719 - RNA, 20 nt, synthetic construct
  source 1..20: mol_type = other RNA
ggtgataataatgataacgg

SEQ ID NO: 5720 - RNA, 20 nt, synthetic construct
  source 1..20: mol_type = other RNA
gatggtgataataatgataa

SEQ ID NO: 5721 - RNA, 20 nt, synthetic construct
  source 1..20: mol_type = other RNA
aatgaagatgataataatga

SEQ ID NO: 5722 - RNA, 20 nt, synthetic construct
  source 1..20: mol_type = other RNA
cattttcatcaccttcatta

SEQ ID NO: 5723 - RNA, 20 nt, synthetic construct
  source 1..20: mol_type = other RNA
tggaatgatggccataatga

SEQ ID NO: 5724 - RNA, 20 nt, synthetic construct
  source 1..20: mol_type = other RNA
tgagctgaggaatggaatga

SEQ ID NO: 5725 - RNA, 20 nt, synthetic construct
  source 1..20: mol_type = other RNA
aaggcttctgagctgaggaa

SEQ ID NO: 5726 - RNA, 20 nt, synthetic construct
  source 1..20: mol_type = other RNA
catagaaggcttctgagctg

SEQ ID NO: 5727 - RNA, 20 nt, synthetic construct
  source 1..20: mol_type = other RNA
ctcagctcagaagccttcta

SEQ ID NO: 5728 - RNA, 20 nt, synthetic construct
  source 1..20: mol_type = other RNA
aagcaatggggagccataga

SEQ ID NO: 5729 - RNA, 20 nt, synthetic construct
  source 1..20: mol_type = other RNA
acttgattttataagcaatg

SEQ ID NO: 5730 - RNA, 20 nt, synthetic construct
  source 1..20: mol_type = other RNA
gacttgattttataagcaat

SEQ ID NO: 5731 - RNA, 20 nt, synthetic construct
  source 1..20: mol_type = other RNA
ggacttgattttataagcaa

SEQ ID NO: 5732 - RNA, 20 nt, synthetic construct
  source 1..20: mol_type = other RNA
gtttcatgctggggaaagtt

SEQ ID NO: 5733 - RNA, 20 nt, synthetic construct
  source 1..20: mol_type = other RNA
gtggtagaagtttcatgctg

SEQ ID NO: 5734 - RNA, 20 nt, synthetic construct
  source 1..20: mol_type = other RNA
ggtggtagaagtttcatgct

SEQ ID NO: 5735 - RNA, 20 nt, synthetic construct
  source 1..20: mol_type = other RNA
cggtggtagaagtttcatgc

SEQ ID NO: 5736 - RNA, 20 nt, synthetic construct
  source 1..20: mol_type = other RNA
ccctgagagataggtgacgg

SEQ ID NO: 5737 - RNA, 20 nt, synthetic construct
  source 1..20: mol_type = other RNA
aaaccctgagagataggtga

SEQ ID NO: 5738 - RNA, 20 nt, synthetic construct
  source 1..20: mol_type = other RNA
tttaggaaaccctgagagat

SEQ ID NO: 5739 - RNA, 20 nt, synthetic construct
  source 1..20: mol_type = other RNA
accaccgtcacctatctctc

SEQ ID NO: 5740 - RNA, 20 nt, synthetic construct
  source 1..20: mol_type = other RNA
ccaccgtcacctatctctca

SEQ ID NO: 5741 - RNA, 20 nt, synthetic construct
  source 1..20: mol_type = other RNA
aacttgttcagagtatgttt

SEQ ID NO: 5742 - RNA, 20 nt, synthetic construct
  source 1..20: mol_type = other RNA
tgggtcacagtggcagagtg

SEQ ID NO: 5743 - RNA, 20 nt, synthetic construct
  source 1..20: mol_type = other RNA
gatagctttctgggtcacag

SEQ ID NO: 5744 - RNA, 20 nt, synthetic construct
  source 1..20: mol_type = other RNA
aggagaacagatagctttct

SEQ ID NO: 5745 - RNA, 20 nt, synthetic construct
  source 1..20: mol_type = other RNA
aaggagaacagatagctttc

SEQ ID NO: 5746 - RNA, 20 nt, synthetic construct
  source 1..20: mol_type = other RNA
atgaggcagagtctgggaga

SEQ ID NO: 5747 - RNA, 20 nt, synthetic construct
  source 1..20: mol_type = other RNA
tgaaagatgaggcagagtct

SEQ ID NO: 5748 - RNA, 20 nt, synthetic construct
  source 1..20: mol_type = other RNA
ttgaaagatgaggcagagtc

SEQ ID NO: 5749 - RNA, 20 nt, synthetic construct
  source 1..20: mol_type = other RNA
gaaccaggccttgaaagatg

SEQ ID NO: 5750 - RNA, 20 nt, synthetic construct
  source 1..20: mol_type = other RNA
agactctgcctcatctttca

SEQ ID NO: 5751 - RNA, 20 nt, synthetic construct
  source 1..20: mol_type = other RNA
ctgcctcatctttcaaggcc

SEQ ID NO: 5752 - RNA, 20 nt, synthetic construct
  source 1..20: mol_type = other RNA
atctttcaaggcctggttcc

SEQ ID NO: 5753 - RNA, 20 nt, synthetic construct
  source 1..20: mol_type = other RNA
gaggaagggatcctggaacc

SEQ ID NO: 5754 - RNA, 20 nt, synthetic construct
  source 1..20: mol_type = other RNA
cttcctggaggaagggatcc

SEQ ID NO: 5755 - RNA, 20 nt, synthetic construct
  source 1..20: mol_type = other RNA
gggaaggcttcctggaggaa

SEQ ID NO: 5756 - RNA, 20 nt, synthetic construct
  source 1..20: mol_type = other RNA
gttccaggatcccttcctcc

SEQ ID NO: 5757 - RNA, 20 nt, synthetic construct
  source 1..20: mol_type = other RNA
agggaaggcttcctggagga

SEQ ID NO: 5758 - RNA, 20 nt, synthetic construct
  source 1..20: mol_type = other RNA
aatcagggaaggcttcctgg

SEQ ID NO: 5759 - RNA, 20 nt, synthetic construct
  source 1..20: mol_type = other RNA
ggcaatcagggaaggcttcc

SEQ ID NO: 5760 - RNA, 20 nt, synthetic construct
  source 1..20: mol_type = other RNA
tggaatagggcaatcaggga

SEQ ID NO: 5761 - RNA, 20 nt, synthetic construct
  source 1..20: mol_type = other RNA
atggtggaatagggcaatca

SEQ ID NO: 5762 - RNA, 20 nt, synthetic construct
  source 1..20: mol_type = other RNA
tatggtggaatagggcaatc

SEQ ID NO: 5763 - RNA, 20 nt, synthetic construct
  source 1..20: mol_type = other RNA
aaaaggtgtatggtggaata

SEQ ID NO: 5764 - RNA, 20 nt, synthetic construct
  source 1..20: mol_type = other RNA
aaaaaggtgtatggtggaat

SEQ ID NO: 5765 - RNA, 20 nt, synthetic construct
  source 1..20: mol_type = other RNA
ccgagaaaaaaggtgtatgg

SEQ ID NO: 5766 - RNA, 20 nt, synthetic construct
  source 1..20: mol_type = other RNA
agtccgagaaaaaaggtgta

SEQ ID NO: 5767 - RNA, 20 nt, synthetic construct
  source 1..20: mol_type = other RNA
gacatgaagtccgagaaaaa

SEQ ID NO: 5768 - RNA, 20 nt, synthetic construct
  source 1..20: mol_type = other RNA
ccaccatacaccttttttct

SEQ ID NO: 5769 - RNA, 20 nt, synthetic construct
  source 1..20: mol_type = other RNA
ttttctcggacttcatgtca

SEQ ID NO: 5770 - RNA, 20 nt, synthetic construct
  source 1..20: mol_type = other RNA
gctcagagcccttggaatat

SEQ ID NO: 5771 - RNA, 20 nt, synthetic construct
  source 1..20: mol_type = other RNA
gtcatggtgcctatattcca

SEQ ID NO: 5772 - RNA, 20 nt, synthetic construct
  source 1..20: mol_type = other RNA
tcatggtgcctatattccaa

SEQ ID NO: 5773 - RNA, 20 nt, synthetic construct
  source 1..20: mol_type = other RNA
ggtacatggctcagagccct

SEQ ID NO: 5774 - RNA, 20 nt, synthetic construct
  source 1..20: mol_type = other RNA
taactatataaaggggtaca

SEQ ID NO: 5775 - RNA, 20 nt, synthetic construct
  source 1..20: mol_type = other RNA
atagtggtaactatataaag

SEQ ID NO: 5776 - RNA, 20 nt, synthetic construct
  source 1..20: mol_type = other RNA
aatagtggtaactatataaa

SEQ ID NO: 5777 - RNA, 20 nt, synthetic construct
  source 1..20: mol_type = other RNA
aaatagtggtaactatataa

SEQ ID NO: 5778 - RNA, 20 nt, synthetic construct
  source 1..20: mol_type = other RNA
agtaggcactcagtaaatag

SEQ ID NO: 5779 - RNA, 20 nt, synthetic construct
  source 1..20: mol_type = other RNA
cacagtagctggtatacagt

SEQ ID NO: 5780 - RNA, 20 nt, synthetic construct
  source 1..20: mol_type = other RNA
agagcatccaacacagtagc

SEQ ID NO: 5781 - RNA, 20 nt, synthetic construct
  source 1..20: mol_type = other RNA
ctgtataccagctactgtgt

SEQ ID NO: 5782 - RNA, 20 nt, synthetic construct
  source 1..20: mol_type = other RNA
gaatcgatggtgataattag

SEQ ID NO: 5783 - RNA, 20 nt, synthetic construct
  source 1..20: mol_type = other RNA
gcctactacccaggaatcga

SEQ ID NO: 5784 - RNA, 20 nt, synthetic construct
  source 1..20: mol_type = other RNA
taattatcaccatcgattcc

SEQ ID NO: 5785 - RNA, 20 nt, synthetic construct
  source 1..20: mol_type = other RNA
aattatcaccatcgattcct

SEQ ID NO: 5786 - RNA, 20 nt, synthetic construct
  source 1..20: mol_type = other RNA
ataaataatgcctactaccc

SEQ ID NO: 5787 - RNA, 20 nt, synthetic construct
  source 1..20: mol_type = other RNA
accatcgattcctgggtagt

SEQ ID NO: 5788 - RNA, 20 nt, synthetic construct
  source 1..20: mol_type = other RNA
atcttacacagatgagaaaa

SEQ ID NO: 5789 - RNA, 20 nt, synthetic construct
  source 1..20: mol_type = other RNA
ttacacagatgagaaaatgg

SEQ ID NO: 5790 - RNA, 20 nt, synthetic construct
  source 1..20: mol_type = other RNA
gagaaaatggaggcccacag

SEQ ID NO: 5791 - RNA, 20 nt, synthetic construct
  source 1..20: mol_type = other RNA
gctacttatttaaccactgt

SEQ ID NO: 5792 - RNA, 20 nt, synthetic construct
  source 1..20: mol_type = other RNA
ggctacttatttaaccactg

SEQ ID NO: 5793 - RNA, 20 nt, synthetic construct
  source 1..20: mol_type = other RNA
cctactagctgtgcaatctt

SEQ ID NO: 5794 - RNA, 20 nt, synthetic construct
  source 1..20: mol_type = other RNA
ccctactagctgtgcaatct

SEQ ID NO: 5795 - RNA, 20 nt, synthetic construct
  source 1..20: mol_type = other RNA
cccaagattgcacagctagt

SEQ ID NO: 5796 - RNA, 20 nt, synthetic construct
  source 1..20: mol_type = other RNA
ccaagattgcacagctagta

SEQ ID NO: 5797 - RNA, 20 nt, synthetic construct
  source 1..20: mol_type = other RNA
tgcacagctagtagggctag

SEQ ID NO: 5798 - RNA, 20 nt, synthetic construct
  source 1..20: mol_type = other RNA
gtagggctagtggaaagtag

SEQ ID NO: 5799 - RNA, 20 nt, synthetic construct
  source 1..20: mol_type = other RNA
gggctagtggaaagtagagg

SEQ ID NO: 5800 - RNA, 20 nt, synthetic construct
  source 1..20: mol_type = other RNA
cagaatggtagagttactgc

SEQ ID NO: 5801 - RNA, 20 nt, synthetic construct
  source 1..20: mol_type = other RNA
caaagaagagcaaggcagaa

SEQ ID NO: 5802 - RNA, 20 nt, synthetic construct
  source 1..20: mol_type = other RNA
tactgctacaaagaagagca

SEQ ID NO: 5803 - RNA, 20 nt, synthetic construct
  source 1..20: mol_type = other RNA
tagcagtagataagttttca

SEQ ID NO: 5804 - RNA, 20 nt, synthetic construct
  source 1..20: mol_type = other RNA
ttaatctaatcaaaaggatg

SEQ ID NO: 5805 - RNA, 20 nt, synthetic construct
  source 1..20: mol_type = other RNA
gggcccttaatctaatcaaa

SEQ ID NO: 5806 - RNA, 20 nt, synthetic construct
  source 1..20: mol_type = other RNA
tcatccttttgattagatta

SEQ ID NO: 5807 - RNA, 20 nt, synthetic construct
  source 1..20: mol_type = other RNA
catccttttgattagattaa

SEQ ID NO: 5808 - RNA, 20 nt, synthetic construct
  source 1..20: mol_type = other RNA
ttgattagattaagggcccc

SEQ ID NO: 5809 - RNA, 20 nt, synthetic construct
  source 1..20: mol_type = other RNA
aatgaacactgacactccag

SEQ ID NO: 5810 - RNA, 20 nt, synthetic construct
  source 1..20: mol_type = other RNA
gaatgaacactgacactcca

SEQ ID NO: 5811 - RNA, 20 nt, synthetic construct
  source 1..20: mol_type = other RNA
tgaatgaacactgacactcc

SEQ ID NO: 5812 - RNA, 20 nt, synthetic construct
  source 1..20: mol_type = other RNA
tctgggcctggcacacagtg

SEQ ID NO: 5813 - RNA, 20 nt, synthetic construct
  source 1..20: mol_type = other RNA
ctctgggcctggcacacagt

SEQ ID NO: 5814 - RNA, 20 nt, synthetic construct
  source 1..20: mol_type = other RNA
cctctgggcctggcacacag

SEQ ID NO: 5815 - RNA, 20 nt, synthetic construct
  source 1..20: mol_type = other RNA
ttgagtccccactgtgtgcc

SEQ ID NO: 5816 - RNA, 20 nt, synthetic construct
  source 1..20: mol_type = other RNA
ggctggggaacctctgggcc

SEQ ID NO: 5817 - RNA, 20 nt, synthetic construct
  source 1..20: mol_type = other RNA
ccactgtgtgccaggcccag

SEQ ID NO: 5818 - RNA, 20 nt, synthetic construct
  source 1..20: mol_type = other RNA
ccttgggctggggaacctct

SEQ ID NO: 5819 - RNA, 20 nt, synthetic construct
  source 1..20: mol_type = other RNA
gccttgggctggggaacctc

SEQ ID NO: 5820 - RNA, 20 nt, synthetic construct
  source 1..20: mol_type = other RNA
gtgtgccaggccttgggctg

SEQ ID NO: 5821 - RNA, 20 nt, synthetic construct
  source 1..20: mol_type = other RNA
cccagaggttccccagccca

SEQ ID NO: 5822 - RNA, 20 nt, synthetic construct
  source 1..20: mol_type = other RNA
tgtgtgccaggccttgggct

SEQ ID NO: 5823 - RNA, 20 nt, synthetic construct
  source 1..20: mol_type = other RNA
ctgtgtgccaggccttgggc

SEQ ID NO: 5824 - RNA, 20 nt, synthetic construct
  source 1..20: mol_type = other RNA
aggttccccagcccaaggcc

SEQ ID NO: 5825 - RNA, 20 nt, synthetic construct
  source 1..20: mol_type = other RNA
cccactgtgtgccaggcctt

SEQ ID NO: 5826 - RNA, 20 nt, synthetic construct
  source 1..20: mol_type = other RNA
gcccactgtgtgccaggcct

SEQ ID NO: 5827 - RNA, 20 nt, synthetic construct
  source 1..20: mol_type = other RNA
ctgaaggcccactgtgtgcc

SEQ ID NO: 5828 - RNA, 20 nt, synthetic construct
  source 1..20: mol_type = other RNA
gcccaaggcctggcacacag

SEQ ID NO: 5829 - RNA, 20 nt, synthetic construct
  source 1..20: mol_type = other RNA
cccaaggcctggcacacagt

SEQ ID NO: 5830 - RNA, 20 nt, synthetic construct
  source 1..20: mol_type = other RNA
aatcaacaaggtctaactga

SEQ ID NO: 5831 - RNA, 20 nt, synthetic construct
  source 1..20: mol_type = other RNA
aaaagcgcagtcaatcaaca

SEQ ID NO: 5832 - RNA, 20 nt, synthetic construct
  source 1..20: mol_type = other RNA
tgactgcgcttttccttgtc

SEQ ID NO: 5833 - RNA, 20 nt, synthetic construct
  source 1..20: mol_type = other RNA
gactgcgcttttccttgtct

SEQ ID NO: 5834 - RNA, 20 nt, synthetic construct
  source 1..20: mol_type = other RNA
ccagttccgctgcccagaca

SEQ ID NO: 5835 - RNA, 20 nt, synthetic construct
  source 1..20: mol_type = other RNA
gcttttccttgtctgggcag

SEQ ID NO: 5836 - RNA, 20 nt, synthetic construct
  source 1..20: mol_type = other RNA
ccttgtctgggcagcggaac

SEQ ID NO: 5837 - RNA, 20 nt, synthetic construct
  source 1..20: mol_type = other RNA
gggagtcctggaagacatac

SEQ ID NO: 5838 - RNA, 20 nt, synthetic construct
  source 1..20: mol_type = other RNA
actggaccagtatgtcttcc

SEQ ID NO: 5839 - RNA, 20 nt, synthetic construct
  source 1..20: mol_type = other RNA
ggccctccagctgggagtcc

SEQ ID NO: 5840 - RNA, 20 nt, synthetic construct
  source 1..20: mol_type = other RNA
tgtcttccaggactcccagc

SEQ ID NO: 5841 - RNA, 20 nt, synthetic construct
  source 1..20: mol_type = other RNA
cttccaggactcccagctgg

SEQ ID NO: 5842 - RNA, 20 nt, synthetic construct
  source 1..20: mol_type = other RNA
cttgctcaggccctccagct

SEQ ID NO: 5843 - RNA, 20 nt, synthetic construct
  source 1..20: mol_type = other RNA
ttccaggactcccagctgga

SEQ ID NO: 5844 - RNA, 20 nt, synthetic construct
  source 1..20: mol_type = other RNA
ccttgctcaggccctccagc

SEQ ID NO: 5845 - RNA, 20 nt, synthetic construct
  source 1..20: mol_type = other RNA
ccagctggagggcctgagca

SEQ ID NO: 5846 - RNA, 20 nt, synthetic construct
  source 1..20: mol_type = other RNA
tactgaaaatgtccttgctc

SEQ ID NO: 5847 - RNA, 20 nt, synthetic construct
  source 1..20: mol_type = other RNA
ggacattttcagtaagtttg

SEQ ID NO: 5848 - RNA, 20 nt, synthetic construct
  source 1..20: mol_type = other RNA
cattttcagtaagtttgtgg

SEQ ID NO: 5849 - RNA, 20 nt, synthetic construct
  source 1..20: mol_type = other RNA
attttcagtaagtttgtggt

SEQ ID NO: 5850 - RNA, 20 nt, synthetic construct
  source 1..20: mol_type = other RNA
ttcagtaagtttgtggtggg

SEQ ID NO: 5851 - RNA, 20 nt, synthetic construct
  source 1..20: mol_type = other RNA
tcagtaagtttgtggtgggt

SEQ ID NO: 5852 - RNA, 20 nt, synthetic construct
  source 1..20: mol_type = other RNA
cagtaagtttgtggtgggtg

SEQ ID NO: 5853 - RNA, 20 nt, synthetic construct
  source 1..20: mol_type = other RNA
taagtttgtggtgggtgggg

SEQ ID NO: 5854 - RNA, 20 nt, synthetic construct
  source 1..20: mol_type = other RNA
tgtggtgggtggggaggtct

SEQ ID NO: 5855 - RNA, 20 nt, synthetic construct
  source 1..20: mol_type = other RNA
gggaacaaggcaggaaatgc

SEQ ID NO: 5856 - RNA, 20 nt, synthetic construct
  source 1..20: mol_type = other RNA
caccccccagggaacaaggc

SEQ ID NO: 5857 - RNA, 20 nt, synthetic construct
  source 1..20: mol_type = other RNA
agggcaccccccagggaaca

SEQ ID NO: 5858 - RNA, 20 nt, synthetic construct
  source 1..20: mol_type = other RNA
gcatttcctgccttgttccc

SEQ ID NO: 5859 - RNA, 20 nt, synthetic construct
  source 1..20: mol_type = other RNA
catttcctgccttgttccct

SEQ ID NO: 5860 - RNA, 20 nt, synthetic construct
  source 1..20: mol_type = other RNA
atttcctgccttgttccctg

SEQ ID NO: 5861 - RNA, 20 nt, synthetic construct
  source 1..20: mol_type = other RNA
tttcctgccttgttccctgg

SEQ ID NO: 5862 - RNA, 20 nt, synthetic construct
  source 1..20: mol_type = other RNA
ttcctgccttgttccctggg

SEQ ID NO: 5863 - RNA, 20 nt, synthetic construct
  source 1..20: mol_type = other RNA
aggtattagggcacccccca

SEQ ID NO: 5864 - RNA, 20 nt, synthetic construct
  source 1..20: mol_type = other RNA
caggtattagggcacccccc

SEQ ID NO: 5865 - RNA, 20 nt, synthetic construct
  source 1..20: mol_type = other RNA
tgaatggtcgtcaggtatta

SEQ ID NO: 5866 - RNA, 20 nt, synthetic construct
  source 1..20: mol_type = other RNA
atgaatggtcgtcaggtatt

SEQ ID NO: 5867 - RNA, 20 nt, synthetic construct
  source 1..20: mol_type = other RNA
cccatcaatgaatggtcgtc

SEQ ID NO: 5868 - RNA, 20 nt, synthetic construct
  source 1..20: mol_type = other RNA
tctgactgcccatcaatgaa

SEQ ID NO: 5869 - RNA, 20 nt, synthetic construct
  source 1..20: mol_type = other RNA
acctgacgaccattcattga

SEQ ID NO: 5870 - RNA, 20 nt, synthetic construct
  source 1..20: mol_type = other RNA
cctgacgaccattcattgat

SEQ ID NO: 5871 - RNA, 20 nt, synthetic construct
  source 1..20: mol_type = other RNA
tgtacccaccttggggagag

SEQ ID NO: 5872 - RNA, 20 nt, synthetic construct
  source 1..20: mol_type = other RNA
ttgtacccaccttggggaga

SEQ ID NO: 5873 - RNA, 20 nt, synthetic construct
  source 1..20: mol_type = other RNA
attgtacccaccttggggag

SEQ ID NO: 5874 - RNA, 20 nt, synthetic construct
  source 1..20: mol_type = other RNA
cagtcagacccctctcccca

SEQ ID NO: 5875 - RNA, 20 nt, synthetic construct
  source 1..20: mol_type = other RNA
tcagacccctctccccaagg

SEQ ID NO: 5876 - RNA, 20 nt, synthetic construct
  source 1..20: mol_type = other RNA
cagacccctctccccaaggt

SEQ ID NO: 5877 - RNA, 20 nt, synthetic construct
  source 1..20: mol_type = other RNA
tctctattgtacccaccttg

SEQ ID NO: 5878 - RNA, 20 nt, synthetic construct
  source 1..20: mol_type = other RNA
gtctctattgtacccacctt

SEQ ID NO: 5879 - RNA, 20 nt, synthetic construct
  source 1..20: mol_type = other RNA
agtctctattgtacccacct

SEQ ID NO: 5880 - RNA, 20 nt, synthetic construct
  source 1..20: mol_type = other RNA
ggtacaatagagactcacct

SEQ ID NO: 5881 - RNA, 20 nt, synthetic construct
  source 1..20: mol_type = other RNA
gtacaatagagactcacctt

SEQ ID NO: 5882 - RNA, 20 nt, synthetic construct
  source 1..20: mol_type = other RNA
acacaatcaatgaaagccca

SEQ ID NO: 5883 - RNA, 20 nt, synthetic construct
  source 1..20: mol_type = other RNA
ctttcattgattgtgtgagt

SEQ ID NO: 5884 - RNA, 20 nt, synthetic construct
  source 1..20: mol_type = other RNA
tgattgtgtgagttggtctc

SEQ ID NO: 5885 - RNA, 20 nt, synthetic construct
  source 1..20: mol_type = other RNA
tttctcaaagtagagcacat

SEQ ID NO: 5886 - RNA, 20 nt, synthetic construct
  source 1..20: mol_type = other RNA
ctctcaccgatcacttcatc

SEQ ID NO: 5887 - RNA, 20 nt, synthetic construct
  source 1..20: mol_type = other RNA
ataggaccagatgaagtgat

SEQ ID NO: 5888 - RNA, 20 nt, synthetic construct
  source 1..20: mol_type = other RNA
tgaagtgatcggtgagagta

SEQ ID NO: 5889 - RNA, 20 nt, synthetic construct
  source 1..20: mol_type = other RNA
cttttctgcccaacttctgc

SEQ ID NO: 5890 - RNA, 20 nt, synthetic construct
  source 1..20: mol_type = other RNA
atggagatgccagcagaagt

SEQ ID NO: 5891 - RNA, 20 nt, synthetic construct
  source 1..20: mol_type = other RNA
tggagatgccagcagaagtt

SEQ ID NO: 5892 - RNA, 20 nt, synthetic construct
  source 1..20: mol_type = other RNA
ggctaggttggatcagggag

SEQ ID NO: 5893 - RNA, 20 nt, synthetic construct
  source 1..20: mol_type = other RNA
aggctaggttggatcaggga

SEQ ID NO: 5894 - RNA, 20 nt, synthetic construct
  source 1..20: mol_type = other RNA
aaggctaggttggatcaggg

SEQ ID NO: 5895 - RNA, 20 nt, synthetic construct
  source 1..20: mol_type = other RNA
agcaaggctaggttggatca

SEQ ID NO: 5896 - RNA, 20 nt, synthetic construct
  source 1..20: mol_type = other RNA
aagcaaggctaggttggatc

SEQ ID NO: 5897 - RNA, 20 nt, synthetic construct
  source 1..20: mol_type = other RNA
ggtctcaagcaaggctaggt

SEQ ID NO: 5898 - RNA, 20 nt, synthetic construct
  source 1..20: mol_type = other RNA
gccaggtctcaagcaaggct

SEQ ID NO: 5899 - RNA, 20 nt, synthetic construct
  source 1..20: mol_type = other RNA
gaaaggccaggtctcaagca

SEQ ID NO: 5900 - RNA, 20 nt, synthetic construct
  source 1..20: mol_type = other RNA
acctagccttgcttgagacc

SEQ ID NO: 5901 - RNA, 20 nt, synthetic construct
  source 1..20: mol_type = other RNA
tttggagtcaaggaaaggcc

SEQ ID NO: 5902 - RNA, 20 nt, synthetic construct
  source 1..20: mol_type = other RNA
caggctttggagtcaaggaa

SEQ ID NO: 5903 - RNA, 20 nt, synthetic construct
  source 1..20: mol_type = other RNA
cacagcaggctttggagtca

SEQ ID NO: 5904 - RNA, 20 nt, synthetic construct
  source 1..20: mol_type = other RNA
gttggacccacagcaggctt

SEQ ID NO: 5905 - RNA, 20 nt, synthetic construct
  source 1..20: mol_type = other RNA
cttgactccaaagcctgctg

SEQ ID NO: 5906 - RNA, 20 nt, synthetic construct
  source 1..20: mol_type = other RNA
ttgactccaaagcctgctgt

SEQ ID NO: 5907 - RNA, 20 nt, synthetic construct
  source 1..20: mol_type = other RNA
aagcaagttggacccacagc

SEQ ID NO: 5908 - RNA, 20 nt, synthetic construct
  source 1..20: mol_type = other RNA
acttagcgagggaagcaagt

SEQ ID NO: 5909 - RNA, 20 nt, synthetic construct
  source 1..20: mol_type = other RNA
aaccagacaggacttagcga

SEQ ID NO: 5910 - RNA, 20 nt, synthetic construct
  source 1..20: mol_type = other RNA
caaccagacaggacttagcg

SEQ ID NO: 5911 - RNA, 20 nt, synthetic construct
  source 1..20: mol_type = other RNA
ttccctcgctaagtcctgtc

SEQ ID NO: 5912 - RNA, 20 nt, synthetic construct
  source 1..20: mol_type = other RNA
aaagggcctcccaaccagac

SEQ ID NO: 5913 - RNA, 20 nt, synthetic construct
  source 1..20: mol_type = other RNA
ctcgctaagtcctgtctggt

SEQ ID NO: 5914 - RNA, 20 nt, synthetic construct
  source 1..20: mol_type = other RNA
tcgctaagtcctgtctggtt

SEQ ID NO: 5915 - RNA, 20 nt, synthetic construct
  source 1..20: mol_type = other RNA
ctaagtcctgtctggttggg

SEQ ID NO: 5916 - RNA, 20 nt, synthetic construct
  source 1..20: mol_type = other RNA
ggctcctgttggcttttaaa

SEQ ID NO: 5917 - RNA, 20 nt, synthetic construct
  source 1..20: mol_type = other RNA
aggctcctgttggcttttaa

SEQ ID NO: 5918 - RNA, 20 nt, synthetic construct
  source 1..20: mol_type = other RNA
gaggccctttaaaagccaac

SEQ ID NO: 5919 - RNA, 20 nt, synthetic construct
  source 1..20: mol_type = other RNA
gtacattttaaggctcctgt

SEQ ID NO: 5920 - RNA, 20 nt, synthetic construct
  source 1..20: mol_type = other RNA
ataatcagatgtacatttta

SEQ ID NO: 5921 - RNA, 20 nt, synthetic construct
  source 1..20: mol_type = other RNA
atgtacatctgattatttca

SEQ ID NO: 5922 - RNA, 20 nt, synthetic construct
  source 1..20: mol_type = other RNA
tagccattggagggttatca

SEQ ID NO: 5923 - RNA, 20 nt, synthetic construct
  source 1..20: mol_type = other RNA
gtagccattggagggttatc

SEQ ID NO: 5924 - RNA, 20 nt, synthetic construct
  source 1..20: mol_type = other RNA
tggccctgataaccctccaa

SEQ ID NO: 5925 - RNA, 20 nt, synthetic construct
  source 1..20: mol_type = other RNA
tgtattttgtagccattgga

SEQ ID NO: 5926 - RNA, 20 nt, synthetic construct
  source 1..20: mol_type = other RNA
atgtattttgtagccattgg

SEQ ID NO: 5927 - RNA, 20 nt, synthetic construct
  source 1..20: mol_type = other RNA
ggcatgtattttgtagccat

SEQ ID NO: 5928 - RNA, 20 nt, synthetic construct
  source 1..20: mol_type = other RNA
gctacaaaatacatgccaca

SEQ ID NO: 5929 - RNA, 20 nt, synthetic construct
  source 1..20: mol_type = other RNA
gaagggccatacaggccttg

SEQ ID NO: 5930 - RNA, 20 nt, synthetic construct
  source 1..20: mol_type = other RNA
tacatgccacaaggcctgta

SEQ ID NO: 5931 - RNA, 20 nt, synthetic construct
  source 1..20: mol_type = other RNA
agagggaggaagggccatac

SEQ ID NO: 5932 - RNA, 20 nt, synthetic construct
  source 1..20: mol_type = other RNA
tgggtttggagagggaggaa

SEQ ID NO: 5933 - RNA, 20 nt, synthetic construct
  source 1..20: mol_type = other RNA
gtgggtttggagagggagga

SEQ ID NO: 5934 - RNA, 20 nt, synthetic construct
  source 1..20: mol_type = other RNA
catagtgggtttggagaggg

SEQ ID NO: 5935 - RNA, 20 nt, synthetic construct
  source 1..20: mol_type = other RNA
tctcatagtgggtttggaga

SEQ ID NO: 5936 - RNA, 20 nt, synthetic construct
  source 1..20: mol_type = other RNA
gtctcatagtgggtttggag

SEQ ID NO: 5937 - RNA, 20 nt, synthetic construct
  source 1..20: mol_type = other RNA
gtggtgtctcatagtgggtt

SEQ ID NO: 5938 - RNA, 20 nt, synthetic construct
  source 1..20: mol_type = other RNA
gaagtgtggtgtctcatagt

SEQ ID NO: 5939 - RNA, 20 nt, synthetic construct
  source 1..20: mol_type = other RNA
tgaagtgtggtgtctcatag

SEQ ID NO: 5940 - RNA, 20 nt, synthetic construct
  source 1..20: mol_type = other RNA
agctggtggtggctgaagtg

SEQ ID NO: 5941 - RNA, 20 nt, synthetic construct
  source 1..20: mol_type = other RNA
aggagtggagaagctggtgg

SEQ ID NO: 5942 - RNA, 20 nt, synthetic construct
  source 1..20: mol_type = other RNA
tataggagtggagaagctgg

SEQ ID NO: 5943 - RNA, 20 nt, synthetic construct
  source 1..20: mol_type = other RNA
ggttataggagtggagaagc

SEQ ID NO: 5944 - RNA, 20 nt, synthetic construct
  source 1..20: mol_type = other RNA
gggcacatgggttataggag

SEQ ID NO: 5945 - RNA, 20 nt, synthetic construct
  source 1..20: mol_type = other RNA
tgaaagggcacatgggttat

SEQ ID NO: 5946 - RNA, 20 nt, synthetic construct
  source 1..20: mol_type = other RNA
cgaggcttgaaagggcacat

SEQ ID NO: 5947 - RNA, 20 nt, synthetic construct
  source 1..20: mol_type = other RNA
ccgaggcttgaaagggcaca

SEQ ID NO: 5948 - RNA, 20 nt, synthetic construct
  source 1..20: mol_type = other RNA
aaaggccccgaggcttgaaa

SEQ ID NO: 5949 - RNA, 20 nt, synthetic construct
  source 1..20: mol_type = other RNA
caaaggccccgaggcttgaa

SEQ ID NO: 5950 - RNA, 20 nt, synthetic construct
  source 1..20: mol_type = other RNA
ccatgtgccctttcaagcct

SEQ ID NO: 5951 - RNA, 20 nt, synthetic construct
  source 1..20: mol_type = other RNA
catgtgccctttcaagcctc

SEQ ID NO: 5952 - RNA, 20 nt, synthetic construct
  source 1..20: mol_type = other RNA
atgtgccctttcaagcctcg

SEQ ID NO: 5953 - RNA, 20 nt, synthetic construct
  source 1..20: mol_type = other RNA
tagcaactgcaaaggccccg

SEQ ID NO: 5954 - RNA, 20 nt, synthetic construct
  source 1..20: mol_type = other RNA
agagactatagcaactgcaa

SEQ ID NO: 5955 - RNA, 20 nt, synthetic construct
  source 1..20: mol_type = other RNA
cagttgctatagtctctatc

SEQ ID NO: 5956 - RNA, 20 nt, synthetic construct
  source 1..20: mol_type = other RNA
catgggaagaactgggggaa

SEQ ID NO: 5957 - RNA, 20 nt, synthetic construct
  source 1..20: mol_type = other RNA
ccatgggaagaactggggga

SEQ ID NO: 5958 - RNA, 20 nt, synthetic construct
  source 1..20: mol_type = other RNA
tcagccatgggaagaactgg

SEQ ID NO: 5959 - RNA, 20 nt, synthetic construct
  source 1..20: mol_type = other RNA
gtcagccatgggaagaactg

SEQ ID NO: 5960 - RNA, 20 nt, synthetic construct
  source 1..20: mol_type = other RNA
agtcagccatgggaagaact

SEQ ID NO: 5961 - RNA, 20 nt, synthetic construct
  source 1..20: mol_type = other RNA
gagtcagccatgggaagaac

SEQ ID NO: 5962 - RNA, 20 nt, synthetic construct
  source 1..20: mol_type = other RNA
ccttcccccagttcttccca

SEQ ID NO: 5963 - RNA, 20 nt, synthetic construct
  source 1..20: mol_type = other RNA
gattcaaaggagtcagccat

SEQ ID NO: 5964 - RNA, 20 nt, synthetic construct
  source 1..20: mol_type = other RNA
agattcaaaggagtcagcca

SEQ ID NO: 5965 - RNA, 20 nt, synthetic construct
  source 1..20: mol_type = other RNA
ccaacaccagaaagattcaa

SEQ ID NO: 5966 - RNA, 20 nt, synthetic construct
  source 1..20: mol_type = other RNA
ctgactcctttgaatctttc

SEQ ID NO: 5967 - RNA, 20 nt, synthetic construct
  source 1..20: mol_type = other RNA
cctttgaatctttctggtgt

SEQ ID NO: 5968 - RNA, 20 nt, synthetic construct
  source 1..20: mol_type = other RNA
gctaaactgtcacctcttcc

SEQ ID NO: 5969 - RNA, 20 nt, synthetic construct
  source 1..20: mol_type = other RNA
cagagaagggttccaggaag

SEQ ID NO: 5970 - RNA, 20 nt, synthetic construct
  source 1..20: mol_type = other RNA
gatggtcagagaagggttcc

SEQ ID NO: 5971 - RNA, 20 nt, synthetic construct
  source 1..20: mol_type = other RNA
atggaaggatggtcagagaa

SEQ ID NO: 5972 - RNA, 20 nt, synthetic construct
  source 1..20: mol_type = other RNA
catggaaggatggtcagaga

SEQ ID NO: 5973 - RNA, 20 nt, synthetic construct
  source 1..20: mol_type = other RNA
agctaatctacatggaagga

SEQ ID NO: 5974 - RNA, 20 nt, synthetic construct
  source 1..20: mol_type = other RNA
actgagctaatctacatgga

SEQ ID NO: 5975 - RNA, 20 nt, synthetic construct
  source 1..20: mol_type = other RNA
aataactgagctaatctaca

SEQ ID NO: 5976 - RNA, 20 nt, synthetic construct
  source 1..20: mol_type = other RNA
tgcaaggaaaaagacacaca

SEQ ID NO: 5977 - RNA, 20 nt, synthetic construct
  source 1..20: mol_type = other RNA
gtaatgagtgctaaactgca

SEQ ID NO: 5978 - RNA, 20 nt, synthetic construct
  source 1..20: mol_type = other RNA
gtttagcactcattaccatc

SEQ ID NO: 5979 - RNA, 20 nt, synthetic construct
  source 1..20: mol_type = other RNA
aggcgtaaaatatgtccaga

SEQ ID NO: 5980 - RNA, 20 nt, synthetic construct
  source 1..20: mol_type = other RNA
gtcctcacagtgggagagca

SEQ ID NO: 5981 - RNA, 20 nt, synthetic construct
  source 1..20: mol_type = other RNA
cgccttgctctcccactgtg

SEQ ID NO: 5982 - RNA, 20 nt, synthetic construct
  source 1..20: mol_type = other RNA
aaggtccctgtcctcacagt

SEQ ID NO: 5983 - RNA, 20 nt, synthetic construct
  source 1..20: mol_type = other RNA
caaggtccctgtcctcacag

SEQ ID NO: 5984 - RNA, 20 nt, synthetic construct
  source 1..20: mol_type = other RNA
tgctctcccactgtgaggac

SEQ ID NO: 5985 - RNA, 20 nt, synthetic construct
  source 1..20: mol_type = other RNA
gctctcccactgtgaggaca

SEQ ID NO: 5986 - RNA, 20 nt, synthetic construct
  source 1..20: mol_type = other RNA
agtcacgagcaagaaagaca

SEQ ID NO: 5987 - RNA, 20 nt, synthetic construct
  source 1..20: mol_type = other RNA
aggcactgcactagatgctg

SEQ ID NO: 5988 - RNA, 20 nt, synthetic construct
  source 1..20: mol_type = other RNA
caggcactgcactagatgct

SEQ ID NO: 5989 - RNA, 20 nt, synthetic construct
  source 1..20: mol_type = other RNA
ccaggcactgcactagatgc

SEQ ID NO: 5990 - RNA, 20 nt, synthetic construct
  source 1..20: mol_type = other RNA
ccagcatctagtgcagtgcc

SEQ ID NO: 5991 - RNA, 20 nt, synthetic construct
  source 1..20: mol_type = other RNA
ctgaggtgctactgcatacc

SEQ ID NO: 5992 - RNA, 20 nt, synthetic construct
  source 1..20: mol_type = other RNA
cattcaacagatatctactg

SEQ ID NO: 5993 - RNA, 20 nt, synthetic construct
  source 1..20: mol_type = other RNA
gaatgaaaacatctgtaaaa

SEQ ID NO: 5994 - RNA, 20 nt, synthetic construct
  source 1..20: mol_type = other RNA
aatgaaaacatctgtaaaat

SEQ ID NO: 5995 - RNA, 20 nt, synthetic construct
  source 1..20: mol_type = other RNA
agttaactgagtacttatta

SEQ ID NO: 5996 - RNA, 20 nt, synthetic construct
  source 1..20: mol_type = other RNA
gttaactgagtacttattat

SEQ ID NO: 5997 - RNA, 20 nt, synthetic construct
  source 1..20: mol_type = other RNA
atagatacaggacttacaca

SEQ ID NO: 5998 - RNA, 20 nt, synthetic construct
  source 1..20: mol_type = other RNA
agaactgaataaatagatac

SEQ ID NO: 5999 - RNA, 20 nt, synthetic construct
  source 1..20: mol_type = other RNA
tatttattcagttcttaaac

SEQ ID NO: 6000 - RNA, 20 nt, synthetic construct
  source 1..20: mol_type = other RNA
taaacaggtgaatcgcacac

SEQ ID NO: 6001 - RNA, 20 nt, synthetic construct
  source 1..20: mol_type = other RNA
aaacaggtgaatcgcacaca

SEQ ID NO: 6002 - RNA, 20 nt, synthetic construct
  source 1..20: mol_type = other RNA
gtgcaaagaatattcagtga

SEQ ID NO: 6003 - RNA, 20 nt, synthetic construct
  source 1..20: mol_type = other RNA
aaagaatattcagtgaaggc

SEQ ID NO: 6004 - RNA, 20 nt, synthetic construct
  source 1..20: mol_type = other RNA
aagaatattcagtgaaggct

SEQ ID NO: 6005 - RNA, 20 nt, synthetic construct
  source 1..20: mol_type = other RNA
tcagtgaaggctgggcgcag

SEQ ID NO: 6006 - RNA, 20 nt, synthetic construct
  source 1..20: mol_type = other RNA
tcccaaactgctgggattac

SEQ ID NO: 6007 - RNA, 20 nt, synthetic construct
  source 1..20: mol_type = other RNA
ccttggcctcccaaactgct

SEQ ID NO: 6008 - RNA, 20 nt, synthetic construct
  source 1..20: mol_type = other RNA
cacctgtaatcccagcagtt

SEQ ID NO: 6009 - RNA, 20 nt, synthetic construct
  source 1..20: mol_type = other RNA
cccttggcctcccaaactgc

SEQ ID NO: 6010 - RNA, 20 nt, synthetic construct
  source 1..20: mol_type = other RNA
acctgtaatcccagcagttt

SEQ ID NO: 6011 - RNA, 20 nt, synthetic construct
  source 1..20: mol_type = other RNA
tgtaatcccagcagtttggg

SEQ ID NO: 6012 - RNA, 20 nt, synthetic construct
  source 1..20: mol_type = other RNA
cccagcagtttgggaggcca

SEQ ID NO: 6013 - RNA, 20 nt, synthetic construct
  source 1..20: mol_type = other RNA
ccagcagtttgggaggccaa

SEQ ID NO: 6014 - RNA, 20 nt, synthetic construct
  source 1..20: mol_type = other RNA
cagcagtttgggaggccaag

SEQ ID NO: 6015 - RNA, 20 nt, synthetic construct
  source 1..20: mol_type = other RNA
agcagtttgggaggccaagg

SEQ ID NO: 6016 - RNA, 20 nt, synthetic construct
  source 1..20: mol_type = other RNA
ctcaagtgatccgtccccct

SEQ ID NO: 6017 - RNA, 20 nt, synthetic construct
  source 1..20: mol_type = other RNA
gtttgggaggccaaggggga

SEQ ID NO: 6018 - RNA, 20 nt, synthetic construct
  source 1..20: mol_type = other RNA
caagggggacggatcacttg

SEQ ID NO: 6019 - RNA, 20 nt, synthetic construct
  source 1..20: mol_type = other RNA
gggacggatcacttgaggtc

SEQ ID NO: 6020 - RNA, 20 nt, synthetic construct
  source 1..20: mol_type = other RNA
tcaggagtttgatacctgcc

SEQ ID NO: 6021 - RNA, 20 nt, synthetic construct
  source 1..20: mol_type = other RNA
tttcaccatgttggccaggc

SEQ ID NO: 6022 - RNA, 20 nt, synthetic construct
  source 1..20: mol_type = other RNA
gcggtttcaccatgttggcc

SEQ ID NO: 6023 - RNA, 20 nt, synthetic construct
  source 1..20: mol_type = other RNA
tgatacctgcctggccaaca

SEQ ID NO: 6024 - RNA, 20 nt, synthetic construct
  source 1..20: mol_type = other RNA
gagacgcggtttcaccatgt

SEQ ID NO: 6025 - RNA, 20 nt, synthetic construct
  source 1..20: mol_type = other RNA
tgtattttttggtagagacg

SEQ ID NO: 6026 - RNA, 20 nt, synthetic construct
  source 1..20: mol_type = other RNA
cggctaatttttgtattttt

SEQ ID NO: 6027 - RNA, 20 nt, synthetic construct
  source 1..20: mol_type = other RNA
caaaaaatacaaaaattagc

SEQ ID NO: 6028 - RNA, 20 nt, synthetic construct
  source 1..20: mol_type = other RNA
aaaaaatacaaaaattagcc

SEQ ID NO: 6029 - RNA, 20 nt, synthetic construct
  source 1..20: mol_type = other RNA
atacaaaaattagccgggtg

SEQ ID NO: 6030 - RNA, 20 nt, synthetic construct
  source 1..20: mol_type = other RNA
caggcgtgcaccaccacacc

SEQ ID NO: 6031 - RNA, 20 nt, synthetic construct
  source 1..20: mol_type = other RNA
caaaaattagccgggtgtgg

SEQ ID NO: 6032 - RNA, 20 nt, synthetic construct
  source 1..20: mol_type = other RNA
tcccgagtagctgggattac

SEQ ID NO: 6033 - RNA, 20 nt, synthetic construct
  source 1..20: mol_type = other RNA
cctcagcctcccgagtagct

SEQ ID NO: 6034 - RNA, 20 nt, synthetic construct
  source 1..20: mol_type = other RNA
cgcctgtaatcccagctact

SEQ ID NO: 6035 - RNA, 20 nt, synthetic construct
  source 1..20: mol_type = other RNA
gcctcagcctcccgagtagc

SEQ ID NO: 6036 - RNA, 20 nt, synthetic construct
  source 1..20: mol_type = other RNA
gcctgtaatcccagctactc

SEQ ID NO: 6037 - RNA, 20 nt, synthetic construct
  source 1..20: mol_type = other RNA
tgtaatcccagctactcggg

SEQ ID NO: 6038 - RNA, 20 nt, synthetic construct
  source 1..20: mol_type = other RNA
cccagctactcgggaggctg

SEQ ID NO: 6039 - RNA, 20 nt, synthetic construct
  source 1..20: mol_type = other RNA
gctactcgggaggctgaggc

SEQ ID NO: 6040 - RNA, 20 nt, synthetic construct
  source 1..20: mol_type = other RNA
caggagaatcgcttgaaccc

SEQ ID NO: 6041 - RNA, 20 nt, synthetic construct
  source 1..20: mol_type = other RNA
gagaatcgcttgaacccagg

SEQ ID NO: 6042 - RNA, 20 nt, synthetic construct
  source 1..20: mol_type = other RNA
aatcgcttgaacccaggagg

SEQ ID NO: 6043 - RNA, 20 nt, synthetic construct
  source 1..20: mol_type = other RNA
cactgcaacctccacctcct

SEQ ID NO: 6044 - RNA, 20 nt, synthetic construct
  source 1..20: mol_type = other RNA
tcactgcaacctccacctcc

SEQ ID NO: 6045 - RNA, 20 nt, synthetic construct
  source 1..20: mol_type = other RNA
cgcttgaacccaggaggtgg

SEQ ID NO: 6046 - RNA, 20 nt, synthetic construct
  source 1..20: mol_type = other RNA
ccacccaggctggagtgcag

SEQ ID NO: 6047 - RNA, 20 nt, synthetic construct
  source 1..20: mol_type = other RNA
cacgccactgcactccagcc

SEQ ID NO: 6048 - RNA, 20 nt, synthetic construct
  source 1..20: mol_type = other RNA
acgccactgcactccagcct

SEQ ID NO: 6049 - RNA, 20 nt, synthetic construct
  source 1..20: mol_type = other RNA
tcttactctgccacccaggc

SEQ ID NO: 6050 - RNA, 20 nt, synthetic construct
  source 1..20: mol_type = other RNA
ccactgcactccagcctggg

SEQ ID NO: 6051 - RNA, 20 nt, synthetic construct
  source 1..20: mol_type = other RNA
agagtcttactctgccaccc

SEQ ID NO: 6052 - RNA, 20 nt, synthetic construct
  source 1..20: mol_type = other RNA
tttttcactgaatattcttt

SEQ ID NO: 6053 - RNA, 20 nt, synthetic construct
  source 1..20: mol_type = other RNA
actacagaacaggagtggga

SEQ ID NO: 6054 - RNA, 20 nt, synthetic construct
  source 1..20: mol_type = other RNA
gactacagaacaggagtggg

SEQ ID NO: 6055 - RNA, 20 nt, synthetic construct
  source 1..20: mol_type = other RNA
agggactacagaacaggagt

SEQ ID NO: 6056 - RNA, 20 nt, synthetic construct
  source 1..20: mol_type = other RNA
gagggactacagaacaggag

SEQ ID NO: 6057 - RNA, 20 nt, synthetic construct
  source 1..20: mol_type = other RNA
aaactgagggactacagaac

SEQ ID NO: 6058 - RNA, 20 nt, synthetic construct
  source 1..20: mol_type = other RNA
taagataggagcaaaactga

SEQ ID NO: 6059 - RNA, 20 nt, synthetic construct
  source 1..20: mol_type = other RNA
ctaagataggagcaaaactg

SEQ ID NO: 6060 - RNA, 20 nt, synthetic construct
  source 1..20: mol_type = other RNA
tcacataggttgactaagat

SEQ ID NO: 6061 - RNA, 20 nt, synthetic construct
  source 1..20: mol_type = other RNA
aaaaaggaagctggtcacat

SEQ ID NO: 6062 - RNA, 20 nt, synthetic construct
  source 1..20: mol_type = other RNA
tgacaaggcaaaaaggaagc

SEQ ID NO: 6063 - RNA, 20 nt, synthetic construct
  source 1..20: mol_type = other RNA
ttatttctgacaaggcaaaa

SEQ ID NO: 6064 - RNA, 20 nt, synthetic construct
  source 1..20: mol_type = other RNA
agctcgctttatttctgaca

SEQ ID NO: 6065 - RNA, 20 nt, synthetic construct
  source 1..20: mol_type = other RNA
tggaaaattaaagcaaatac

SEQ ID NO: 6066 - RNA, 20 nt, synthetic construct
  source 1..20: mol_type = other RNA
ataaaatgtggtcatttgca

SEQ ID NO: 6067 - RNA, 20 nt, synthetic construct
  source 1..20: mol_type = other RNA
agaatagtgtaaataaaatg

SEQ ID NO: 6068 - RNA, 20 nt, synthetic construct
  source 1..20: mol_type = other RNA
ttacttcattactccctgtc

SEQ ID NO: 6069 - RNA, 20 nt, synthetic construct
  source 1..20: mol_type = other RNA
tacttcattactccctgtct

SEQ ID NO: 6070 - RNA, 20 nt, synthetic construct
  source 1..20: mol_type = other RNA
ggaacgtgacctcccagaca

SEQ ID NO: 6071 - RNA, 20 nt, synthetic construct
  source 1..20: mol_type = other RNA
tggaacgtgacctcccagac

SEQ ID NO: 6072 - RNA, 20 nt, synthetic construct
  source 1..20: mol_type = other RNA
ttcattactccctgtctggg

SEQ ID NO: 6073 - RNA, 20 nt, synthetic construct
  source 1..20: mol_type = other RNA
tgtcctctccctcaataata

SEQ ID NO: 6074 - RNA, 20 nt, synthetic construct
  source 1..20: mol_type = other RNA
ggtcacgttccatattattg

SEQ ID NO: 6075 - RNA, 20 nt, synthetic construct
  source 1..20: mol_type = other RNA
gtcacgttccatattattga

SEQ ID NO: 6076 - RNA, 20 nt, synthetic construct
  source 1..20: mol_type = other RNA
gttccatattattgagggag

SEQ ID NO: 6077 - RNA, 20 nt, synthetic construct
  source 1..20: mol_type = other RNA
tattattgagggagaggaca

SEQ ID NO: 6078 - RNA, 20 nt, synthetic construct
  source 1..20: mol_type = other RNA
ataaagaagctgctgaagat

SEQ ID NO: 6079 - RNA, 20 nt, synthetic construct
  source 1..20: mol_type = other RNA
tttcacaataaaatcttggg

SEQ ID NO: 6080 - RNA, 20 nt, synthetic construct
  source 1..20: mol_type = other RNA
ctttcacaataaaatcttgg

SEQ ID NO: 6081 - RNA, 20 nt, synthetic construct
  source 1..20: mol_type = other RNA
actttcacaataaaatcttg

SEQ ID NO: 6082 - RNA, 20 nt, synthetic construct
  source 1..20: mol_type = other RNA
aactttcacaataaaatctt

SEQ ID NO: 6083 - RNA, 20 nt, synthetic construct
  source 1..20: mol_type = other RNA
aaactttcacaataaaatct

SEQ ID NO: 6084 - RNA, 20 nt, synthetic construct
  source 1..20: mol_type = other RNA
gattttattgtgaaagtttt

SEQ ID NO: 6085 - RNA, 20 nt, synthetic construct
  source 1..20: mol_type = other RNA
tattgtgaaagttttcggcc

SEQ ID NO: 6086 - RNA, 20 nt, synthetic construct
  source 1..20: mol_type = other RNA
tgaaagttttcggccaggcg

SEQ ID NO: 6087 - RNA, 20 nt, synthetic construct
  source 1..20: mol_type = other RNA
cagatgtgagccaccacgcc

SEQ ID NO: 6088 - RNA, 20 nt, synthetic construct
  source 1..20: mol_type = other RNA
aagttttcggccaggcgtgg

SEQ ID NO: 6089 - RNA, 20 nt, synthetic construct
  source 1..20: mol_type = other RNA
ccttggcctcccaaagtgct

SEQ ID NO: 6090 - RNA, 20 nt, synthetic construct
  source 1..20: mol_type = other RNA
catctgtaatcccagcactt

SEQ ID NO: 6091 - RNA, 20 nt, synthetic construct
  source 1..20: mol_type = other RNA
gccttggcctcccaaagtgc

SEQ ID NO: 6092 - RNA, 20 nt, synthetic construct
  source 1..20: mol_type = other RNA
atctgtaatcccagcacttt

SEQ ID NO: 6093 - RNA, 20 nt, synthetic construct
  source 1..20: mol_type = other RNA
tgtaatcccagcactttggg

SEQ ID NO: 6094 - RNA, 20 nt, synthetic construct
  source 1..20: mol_type = other RNA
cccagcactttgggaggcca

SEQ ID NO: 6095 - RNA, 20 nt, synthetic construct
  source 1..20: mol_type = other RNA
gcactttgggaggccaaggc

SEQ ID NO: 6096 - RNA, 20 nt, synthetic construct
  source 1..20: mol_type = other RNA
ctcaggtgatctgccagcct

SEQ ID NO: 6097 - RNA, 20 nt, synthetic construct
  source 1..20: mol_type = other RNA
caaggctggcagatcacctg

SEQ ID NO: 6098 - RNA, 20 nt, synthetic construct
  source 1..20: mol_type = other RNA
ggtctcaaactcttgacctc

SEQ ID NO: 6099 - RNA, 20 nt, synthetic construct
  source 1..20: mol_type = other RNA
tcaagagtttgagaccagcc

SEQ ID NO: 6100 - RNA, 20 nt, synthetic construct
  source 1..20: mol_type = other RNA
tttcaccatgttggccaggc

SEQ ID NO: 6101 - RNA, 20 nt, synthetic construct
  source 1..20: mol_type = other RNA
ggggtttcaccatgttggcc

SEQ ID NO: 6102 - RNA, 20 nt, synthetic construct
  source 1..20: mol_type = other RNA
tgagaccagcctggccaaca

SEQ ID NO: 6103 - RNA, 20 nt, synthetic construct
  source 1..20: mol_type = other RNA
gagatggggtttcaccatgt

SEQ ID NO: 6104 - RNA, 20 nt, synthetic construct
  source 1..20: mol_type = other RNA
ttgtatttttagtagagatg

SEQ ID NO: 6105 - RNA, 20 nt, synthetic construct
  source 1..20: mol_type = other RNA
tttgtatttttagtagagat

SEQ ID NO: 6106 - RNA, 20 nt, synthetic construct
  source 1..20: mol_type = other RNA
ttttgtatttttagtagaga

SEQ ID NO: 6107 - RNA, 20 nt, synthetic construct
  source 1..20: mol_type = other RNA
taaaaatacaaaaattagcc

SEQ ID NO: 6108 - RNA, 20 nt, synthetic construct
  source 1..20: mol_type = other RNA
atacaaaaattagccaggcg

SEQ ID NO: 6109 - RNA, 20 nt, synthetic construct
  source 1..20: mol_type = other RNA
caggtgttcgccaccacgcc

SEQ ID NO: 6110 - RNA, 20 nt, synthetic construct
  source 1..20: mol_type = other RNA
caaaaattagccaggcgtgg

SEQ ID NO: 6111 - RNA, 20 nt, synthetic construct
  source 1..20: mol_type = other RNA
tccctggtagctgggattac

SEQ ID NO: 6112 - RNA, 20 nt, synthetic construct
  source 1..20: mol_type = other RNA
ccctagcctccctggtagct

SEQ ID NO: 6113 - RNA, 20 nt, synthetic construct
  source 1..20: mol_type = other RNA
cacctgtaatcccagctacc

SEQ ID NO: 6114 - RNA, 20 nt, synthetic construct
  source 1..20: mol_type = other RNA
accctagcctccctggtagc

SEQ ID NO: 6115 - RNA, 20 nt, synthetic construct
  source 1..20: mol_type = other RNA
acctgtaatcccagctacca

SEQ ID NO: 6116 - RNA, 20 nt, synthetic construct
  source 1..20: mol_type = other RNA
tgtaatcccagctaccaggg

SEQ ID NO: 6117 - RNA, 20 nt, synthetic construct
  source 1..20: mol_type = other RNA
ttctcccaccctagcctccc

SEQ ID NO: 6118 - RNA, 20 nt, synthetic construct
  source 1..20: mol_type = other RNA
tcccagctaccagggaggct

SEQ ID NO: 6119 - RNA, 20 nt, synthetic construct
  source 1..20: mol_type = other RNA
cccagctaccagggaggcta

SEQ ID NO: 6120 - RNA, 20 nt, synthetic construct
  source 1..20: mol_type = other RNA
agctaccagggaggctaggg

SEQ ID NO: 6121 - RNA, 20 nt, synthetic construct
  source 1..20: mol_type = other RNA
gctaccagggaggctagggt

SEQ ID NO: 6122 - RNA, 20 nt, synthetic construct
  source 1..20: mol_type = other RNA
cactgcaacctctgcttctt

SEQ ID NO: 6123 - RNA, 20 nt, synthetic construct
  source 1..20: mol_type = other RNA
cgcttgaacctaagaagcag

SEQ ID NO: 6124 - RNA, 20 nt, synthetic construct
  source 1..20: mol_type = other RNA
ggagtgcactggcgcaatct

SEQ ID NO: 6125 - RNA, 20 nt, synthetic construct
  source 1..20: mol_type = other RNA
ttgcccaggctggagtgcac

SEQ ID NO: 6126 - RNA, 20 nt, synthetic construct
  source 1..20: mol_type = other RNA
tgcgccagtgcactccagcc

SEQ ID NO: 6127 - RNA, 20 nt, synthetic construct
  source 1..20: mol_type = other RNA
gcgccagtgcactccagcct

SEQ ID NO: 6128 - RNA, 20 nt, synthetic construct
  source 1..20: mol_type = other RNA
tctagctctgttgcccaggc

SEQ ID NO: 6129 - RNA, 20 nt, synthetic construct
  source 1..20: mol_type = other RNA
agagtctagctctgttgccc

SEQ ID NO: 6130 - RNA, 20 nt, synthetic construct
  source 1..20: mol_type = other RNA
atacaataaaagtgaaagaa

SEQ ID NO: 6131 - RNA, 20 nt, synthetic construct
  source 1..20: mol_type = other RNA
gtgaaagaatggtactatga

SEQ ID NO: 6132 - RNA, 20 nt, synthetic construct
  source 1..20: mol_type = other RNA
aatggtacatggtgggtata

SEQ ID NO: 6133 - RNA, 20 nt, synthetic construct
  source 1..20: mol_type = other RNA
gaatcaaaatggtacatggt

SEQ ID NO: 6134 - RNA, 20 nt, synthetic construct
  source 1..20: mol_type = other RNA
agaatcaaaatggtacatgg

SEQ ID NO: 6135 - RNA, 20 nt, synthetic construct
  source 1..20: mol_type = other RNA
tgtagaatcaaaatggtaca

SEQ ID NO: 6136 - RNA, 20 nt, synthetic construct
  source 1..20: mol_type = other RNA
cattaattgtagaatcaaaa

SEQ ID NO: 6137 - RNA, 20 nt, synthetic construct
  source 1..20: mol_type = other RNA
tttgattctacaattaatgt

SEQ ID NO: 6138 - RNA, 20 nt, synthetic construct
  source 1..20: mol_type = other RNA
ttgattctacaattaatgtt

SEQ ID NO: 6139 - RNA, 20 nt, synthetic construct
  source 1..20: mol_type = other RNA
tgtgtggatggatagaggga

SEQ ID NO: 6140 - RNA, 20 nt, synthetic construct
  source 1..20: mol_type = other RNA
tgggtgtgtggatggataga

SEQ ID NO: 6141 - RNA, 20 nt, synthetic construct
  source 1..20: mol_type = other RNA
atgggtgtgtggatggatag

SEQ ID NO: 6142 - RNA, 20 nt, synthetic construct
  source 1..20: mol_type = other RNA
ataatgaatgggtgtgtgga

SEQ ID NO: 6143 - RNA, 20 nt, synthetic construct
  source 1..20: mol_type = other RNA
aaatataatgaatgggtgtg

SEQ ID NO: 6144 - RNA, 20 nt, synthetic construct
  source 1..20: mol_type = other RNA
gtaccaaaaatataatgaat

SEQ ID NO: 6145 - RNA, 20 nt, synthetic construct
  source 1..20: mol_type = other RNA
tgtaccaaaaatataatgaa

SEQ ID NO: 6146 - RNA, 20 nt, synthetic construct
  source 1..20: mol_type = other RNA
acacccattcattatatttt

SEQ ID NO: 6147 - RNA, 20 nt, synthetic construct
  source 1..20: mol_type = other RNA
aggatgctgaagtacacgag

SEQ ID NO: 6148 - RNA, 20 nt, synthetic construct
  source 1..20: mol_type = other RNA
aaggatgctgaagtacacga

SEQ ID NO: 6149 - RNA, 20 nt, synthetic construct
  source 1..20: mol_type = other RNA
aaaggatgctgaagtacacg

SEQ ID NO: 6150 - RNA, 20 nt, synthetic construct
  source 1..20: mol_type = other RNA
actgcatggccttaaaagaa

SEQ ID NO: 6151 - RNA, 20 nt, synthetic construct
  source 1..20: mol_type = other RNA
cttcagcatcctttctttta

SEQ ID NO: 6152 - RNA, 20 nt, synthetic construct
  source 1..20: mol_type = other RNA
ctacccaacgaaacactgca

SEQ ID NO: 6153 - RNA, 20 nt, synthetic construct
  source 1..20: mol_type = other RNA
aaggccatgcagtgtttcgt

SEQ ID NO: 6154 - RNA, 20 nt, synthetic construct
  source 1..20: mol_type = other RNA
aggccatgcagtgtttcgtt

SEQ ID NO: 6155 - RNA, 20 nt, synthetic construct
  source 1..20: mol_type = other RNA
gggactgcttaaacaaatta

SEQ ID NO: 6156 - RNA, 20 nt, synthetic construct
  source 1..20: mol_type = other RNA
gtttaagcagtcccttgcta

SEQ ID NO: 6157 - RNA, 20 nt, synthetic construct
  source 1..20: mol_type = other RNA
acccacgtgtcccttagcaa

SEQ ID NO: 6158 - RNA, 20 nt, synthetic construct
  source 1..20: mol_type = other RNA
tttaagcagtcccttgctaa

SEQ ID NO: 6159 - RNA, 20 nt, synthetic construct
  source 1..20: mol_type = other RNA
aacccacgtgtcccttagca

SEQ ID NO: 6160 - RNA, 20 nt, synthetic construct
  source 1..20: mol_type = other RNA
gtcccttgctaagggacacg

SEQ ID NO: 6161 - RNA, 20 nt, synthetic construct
  source 1..20: mol_type = other RNA
tcccttgctaagggacacgt

SEQ ID NO: 6162 - RNA, 20 nt, synthetic construct
  source 1..20: mol_type = other RNA
gatactcactcactgatttc

SEQ ID NO: 6163 - RNA, 20 nt, synthetic construct
  source 1..20: mol_type = other RNA
ggtggtggttcctacattgc

SEQ ID NO: 6164 - RNA, 20 nt, synthetic construct
  source 1..20: mol_type = other RNA
ctggcatactcctgcaatgt

SEQ ID NO: 6165 - RNA, 20 nt, synthetic construct
  source 1..20: mol_type = other RNA
catctatgaaatgggggtgg

SEQ ID NO: 6166 - RNA, 20 nt, synthetic construct
  source 1..20: mol_type = other RNA
tcacatctatgaaatggggg

SEQ ID NO: 6167 - RNA, 20 nt, synthetic construct
  source 1..20: mol_type = other RNA
atctcacatctatgaaatgg

SEQ ID NO: 6168 - RNA, 20 nt, synthetic construct
  source 1..20: mol_type = other RNA
gatctcacatctatgaaatg

SEQ ID NO: 6169 - RNA, 20 nt, synthetic construct
  source 1..20: mol_type = other RNA
tgatctcacatctatgaaat

SEQ ID NO: 6170 - RNA, 20 nt, synthetic construct
  source 1..20: mol_type = other RNA
ttgatctcacatctatgaaa

SEQ ID NO: 6171 - RNA, 20 nt, synthetic construct
  source 1..20: mol_type = other RNA
tttcatagatgtgagatcaa

SEQ ID NO: 6172 - RNA, 20 nt, synthetic construct
  source 1..20: mol_type = other RNA
tcagagaagctgcattgcaa

SEQ ID NO: 6173 - RNA, 20 nt, synthetic construct
  source 1..20: mol_type = other RNA
cattgcaaaggcacacagct

SEQ ID NO: 6174 - RNA, 20 nt, synthetic construct
  source 1..20: mol_type = other RNA
aaaggcacacagctaggaag

SEQ ID NO: 6175 - RNA, 20 nt, synthetic construct
  source 1..20: mol_type = other RNA
ctaggaagcggttcaaaagc

SEQ ID NO: 6176 - RNA, 20 nt, synthetic construct
  source 1..20: mol_type = other RNA
aacaaaacaaaacaaaacaa

SEQ ID NO: 6177 - RNA, 20 nt, synthetic construct
  source 1..20: mol_type = other RNA
cacaaatggggacacaacat

SEQ ID NO: 6178 - RNA, 20 nt, synthetic construct
  source 1..20: mol_type = other RNA
tcacaaatggggacacaaca

SEQ ID NO: 6179 - RNA, 20 nt, synthetic construct
  source 1..20: mol_type = other RNA
aagaggccgagtcacaaatg

SEQ ID NO: 6180 - RNA, 20 nt, synthetic construct
  source 1..20: mol_type = other RNA
gaagaggccgagtcacaaat

SEQ ID NO: 6181 - RNA, 20 nt, synthetic construct
  source 1..20: mol_type = other RNA
agaagaggccgagtcacaaa

SEQ ID NO: 6182 - RNA, 20 nt, synthetic construct
  source 1..20: mol_type = other RNA
ttgtgtccccatttgtgact

SEQ ID NO: 6183 - RNA, 20 nt, synthetic construct
  source 1..20: mol_type = other RNA
aggcagtgtagcagcagaag

SEQ ID NO: 6184 - RNA, 20 nt, synthetic construct
  source 1..20: mol_type = other RNA
tcttctgctgctacactgcc

SEQ ID NO: 6185 - RNA, 20 nt, synthetic construct
  source 1..20: mol_type = other RNA
tgctgctacactgcctggta

SEQ ID NO: 6186 - RNA, 20 nt, synthetic construct
  source 1..20: mol_type = other RNA
accccatctcaaaccatacc

SEQ ID NO: 6187 - RNA, 20 nt, synthetic construct
  source 1..20: mol_type = other RNA
ctgcctggtatggtttgaga

SEQ ID NO: 6188 - RNA, 20 nt, synthetic construct
  source 1..20: mol_type = other RNA
tgcctggtatggtttgagat

SEQ ID NO: 6189 - RNA, 20 nt, synthetic construct
  source 1..20: mol_type = other RNA
gcctggtatggtttgagatg

SEQ ID NO: 6190 - RNA, 20 nt, synthetic construct
  source 1..20: mol_type = other RNA
gtatggtttgagatggggtt

SEQ ID NO: 6191 - RNA, 20 nt, synthetic construct
  source 1..20: mol_type = other RNA
tatggtttgagatggggttt

SEQ ID NO: 6192 - RNA, 20 nt, synthetic construct
  source 1..20: mol_type = other RNA
tggggtttgggttcaagcca

SEQ ID NO: 6193 - RNA, 20 nt, synthetic construct
  source 1..20: mol_type = other RNA
ttgggttcaagccaaggagc

SEQ ID NO: 6194 - RNA, 20 nt, synthetic construct
  source 1..20: mol_type = other RNA
acattccaaccccagctcct

SEQ ID NO: 6195 - RNA, 20 nt, synthetic construct
  source 1..20: mol_type = other RNA
tgggttcaagccaaggagct

SEQ ID NO: 6196 - RNA, 20 nt, synthetic construct
  source 1..20: mol_type = other RNA
gggttcaagccaaggagctg

SEQ ID NO: 6197 - RNA, 20 nt, synthetic construct
  source 1..20: mol_type = other RNA
tcaagccaaggagctggggt

SEQ ID NO: 6198 - RNA, 20 nt, synthetic construct
  source 1..20: mol_type = other RNA
ggggttggaatgttagagcg

SEQ ID NO: 6199 - RNA, 20 nt, synthetic construct
  source 1..20: mol_type = other RNA
gggttggaatgttagagcga

SEQ ID NO: 6200 - RNA, 20 nt, synthetic construct
  source 1..20: mol_type = other RNA
ggttggaatgttagagcgag

SEQ ID NO: 6201 - RNA, 20 nt, synthetic construct
  source 1..20: mol_type = other RNA
tggaatgttagagcgagggg

SEQ ID NO: 6202 - RNA, 20 nt, synthetic construct
  source 1..20: mol_type = other RNA
ttagagcgaggggaggaaaa

SEQ ID NO: 6203 - RNA, 20 nt, synthetic construct
  source 1..20: mol_type = other RNA
aggctgggtagtggtcttgg

SEQ ID NO: 6204 - RNA, 20 nt, synthetic construct
  source 1..20: mol_type = other RNA
aaggctgggtagtggtcttg

SEQ ID NO: 6205 - RNA, 20 nt, synthetic construct
  source 1..20: mol_type = other RNA
caaggctgggtagtggtctt

SEQ ID NO: 6206 - RNA, 20 nt, synthetic construct
  source 1..20: mol_type = other RNA
tcaaggctgggtagtggtct

SEQ ID NO: 6207 - RNA, 20 nt, synthetic construct
  source 1..20: mol_type = other RNA
ttaacttcaaggctgggtag

SEQ ID NO: 6208 - RNA, 20 nt, synthetic construct
  source 1..20: mol_type = other RNA
acggccttaacttcaaggct

SEQ ID NO: 6209 - RNA, 20 nt, synthetic construct
  source 1..20: mol_type = other RNA
tacggccttaacttcaaggc

SEQ ID NO: 6210 - RNA, 20 nt, synthetic construct
  source 1..20: mol_type = other RNA
gctatacggccttaacttca

SEQ ID NO: 6211 - RNA, 20 nt, synthetic construct
  source 1..20: mol_type = other RNA
actacccagccttgaagtta

SEQ ID NO: 6212 - RNA, 20 nt, synthetic construct
  source 1..20: mol_type = other RNA
caggactctagcaggctata

SEQ ID NO: 6213 - RNA, 20 nt, synthetic construct
  source 1..20: mol_type = other RNA
aaggggctcaggactctagc

SEQ ID NO: 6214 - RNA, 20 nt, synthetic construct
  source 1..20: mol_type = other RNA
tcccaagccagaaggggctc

SEQ ID NO: 6215 - RNA, 20 nt, synthetic construct
  source 1..20: mol_type = other RNA
ctagagtcctgagccccttc

SEQ ID NO: 6216 - RNA, 20 nt, synthetic construct
  source 1..20: mol_type = other RNA
aggatgtcccaagccagaag

SEQ ID NO: 6217 - RNA, 20 nt, synthetic construct
  source 1..20: mol_type = other RNA
gaggatgtcccaagccagaa

SEQ ID NO: 6218 - RNA, 20 nt, synthetic construct
  source 1..20: mol_type = other RNA
agaggatgtcccaagccaga

SEQ ID NO: 6219 - RNA, 20 nt, synthetic construct
  source 1..20: mol_type = other RNA
gtcctgagccccttctggct

SEQ ID NO: 6220 - RNA, 20 nt, synthetic construct
  source 1..20: mol_type = other RNA
tcctgagccccttctggctt

SEQ ID NO: 6221 - RNA, 20 nt, synthetic construct
  source 1..20: mol_type = other RNA
ggcttgggacatcctctccc

SEQ ID NO: 6222 - RNA, 20 nt, synthetic construct
  source 1..20: mol_type = other RNA
gcttgggacatcctctccct

SEQ ID NO: 6223 - RNA, 20 nt, synthetic construct
  source 1..20: mol_type = other RNA
tgatcagctgccccagggag

SEQ ID NO: 6224 - RNA, 20 nt, synthetic construct
  source 1..20: mol_type = other RNA
cttgggacatcctctccctg

SEQ ID NO: 6225 - RNA, 20 nt, synthetic construct
  source 1..20: mol_type = other RNA
acatgtgatcagctgcccca

SEQ ID NO: 6226 - RNA, 20 nt, synthetic construct
  source 1..20: mol_type = other RNA
aacatgtgatcagctgcccc

SEQ ID NO: 6227 - RNA, 20 nt, synthetic construct
  source 1..20: mol_type = other RNA
tttctctgcagccttcccag

SEQ ID NO: 6228 - RNA, 20 nt, synthetic construct
  source 1..20: mol_type = other RNA
tgccggaagctcctctggga

SEQ ID NO: 6229 - RNA, 20 nt, synthetic construct
  source 1..20: mol_type = other RNA
ggtctgccggaagctcctct

SEQ ID NO: 6230 - RNA, 20 nt, synthetic construct
  source 1..20: mol_type = other RNA
aggtctgccggaagctcctc

SEQ ID NO: 6231 - RNA, 20 nt, synthetic construct
  source 1..20: mol_type = other RNA
agccttcccagaggagcttc

SEQ ID NO: 6232 - RNA, 20 nt, synthetic construct
  source 1..20: mol_type = other RNA
ttccagtgcttcaggtctgc

SEQ ID NO: 6233 - RNA, 20 nt, synthetic construct
  source 1..20: mol_type = other RNA
cacctggcttccagtgcttc

SEQ ID NO: 6234 - RNA, 20 nt, synthetic construct
  source 1..20: mol_type = other RNA
ttccggcagacctgaagcac

SEQ ID NO: 6235 - RNA, 20 nt, synthetic construct
  source 1..20: mol_type = other RNA
gacctgaagcactggaagcc

SEQ ID NO: 6236 - RNA, 20 nt, synthetic construct
  source 1..20: mol_type = other RNA
gcccacctgccctgcacacc

SEQ ID NO: 6237 - RNA, 20 nt, synthetic construct
  source 1..20: mol_type = other RNA
gcactggaagccaggtgtgc

SEQ ID NO: 6238 - RNA, 20 nt, synthetic construct
  source 1..20: mol_type = other RNA
cactggaagccaggtgtgca

SEQ ID NO: 6239 - RNA, 20 nt, synthetic construct
  source 1..20: mol_type = other RNA
ggaagccaggtgtgcagggc

SEQ ID NO: 6240 - RNA, 20 nt, synthetic construct
  source 1..20: mol_type = other RNA
agccaggtgtgcagggcagg

SEQ ID NO: 6241 - RNA, 20 nt, synthetic construct
  source 1..20: mol_type = other RNA
gccaggtgtgcagggcaggt

SEQ ID NO: 6242 - RNA, 20 nt, synthetic construct
  source 1..20: mol_type = other RNA
ggtgtgcagggcaggtgggc

SEQ ID NO: 6243 - RNA, 20 nt, synthetic construct
  source 1..20: mol_type = other RNA
gtgtgcagggcaggtgggct

SEQ ID NO: 6244 - RNA, 20 nt, synthetic construct
  source 1..20: mol_type = other RNA
tgtgcagggcaggtgggctg

SEQ ID NO: 6245 - RNA, 20 nt, synthetic construct
  source 1..20: mol_type = other RNA
cagggcaggtgggctggggt

SEQ ID NO: 6246 - RNA, 20 nt, synthetic construct
  source 1..20: mol_type = other RNA
agggcaggtgggctggggtt

SEQ ID NO: 6247 - RNA, 20 nt, synthetic construct
  source 1..20: mol_type = other RNA
caggtgggctggggttggga

SEQ ID NO: 6248 - RNA, 20 nt, synthetic construct
  source 1..20: mol_type = other RNA
aggtgggctggggttgggaa

SEQ ID NO: 6249 - RNA, 20 nt, synthetic construct
  source 1..20: mol_type = other RNA
tgggctggggttgggaaggg

SEQ ID NO: 6250 - RNA, 20 nt, synthetic construct
  source 1..20: mol_type = other RNA
gttgggaagggtggatgcct

SEQ ID NO: 6251 - RNA, 20 nt, synthetic construct
  source 1..20: mol_type = other RNA
ttgggaagggtggatgcctt

SEQ ID NO: 6252 - RNA, 20 nt, synthetic construct
  source 1..20: mol_type = other RNA
tgggaagggtggatgccttg

SEQ ID NO: 6253 - RNA, 20 nt, synthetic construct
  source 1..20: mol_type = other RNA
gaagggtggatgccttgggg

SEQ ID NO: 6254 - RNA, 20 nt, synthetic construct
  source 1..20: mol_type = other RNA
aagggtggatgccttgggga

SEQ ID NO: 6255 - RNA, 20 nt, synthetic construct
  source 1..20: mol_type = other RNA
tctcttccatcccctcccca

SEQ ID NO: 6256 - RNA, 20 nt, synthetic construct
  source 1..20: mol_type = other RNA
agggtggatgccttggggag

SEQ ID NO: 6257 - RNA, 20 nt, synthetic construct
  source 1..20: mol_type = other RNA
tggatgccttggggagggga

SEQ ID NO: 6258 - RNA, 20 nt, synthetic construct
  source 1..20: mol_type = other RNA
gatggaagagattgaactcc

SEQ ID NO: 6259 - RNA, 20 nt, synthetic construct
  source 1..20: mol_type = other RNA
atccccatcagacttgggcc

SEQ ID NO: 6260 - RNA, 20 nt, synthetic construct
  source 1..20: mol_type = other RNA
gcaccatccccatcagactt

SEQ ID NO: 6261 - RNA, 20 nt, synthetic construct
  source 1..20: mol_type = other RNA
tgcaccatccccatcagact

SEQ ID NO: 6262 - RNA, 20 nt, synthetic construct
  source 1..20: mol_type = other RNA
aactcctggcccaagtctga

SEQ ID NO: 6263 - RNA, 20 nt, synthetic construct
  source 1..20: mol_type = other RNA
actcctggcccaagtctgat

SEQ ID NO: 6264 - RNA, 20 nt, synthetic construct
  source 1..20: mol_type = other RNA
ctcctggcccaagtctgatg

SEQ ID NO: 6265 - RNA, 20 nt, synthetic construct
  source 1..20: mol_type = other RNA
tggcccaagtctgatgggga

SEQ ID NO: 6266 - RNA, 20 nt, synthetic construct
  source 1..20: mol_type = other RNA
agtctgatggggatggtgca

SEQ ID NO: 6267 - RNA, 20 nt, synthetic construct
  source 1..20: mol_type = other RNA
ctctacccaaagaagggcag

SEQ ID NO: 6268 - RNA, 20 nt, synthetic construct
  source 1..20: mol_type = other RNA
cctctacccaaagaagggca

SEQ ID NO: 6269 - RNA, 20 nt, synthetic construct
  source 1..20: mol_type = other RNA
gcctctacccaaagaagggc

SEQ ID NO: 6270 - RNA, 20 nt, synthetic construct
  source 1..20: mol_type = other RNA
gtgcagcccctgcccttctt

SEQ ID NO: 6271 - RNA, 20 nt, synthetic construct
  source 1..20: mol_type = other RNA
tgcagcccctgcccttcttt

SEQ ID NO: 6272 - RNA, 20 nt, synthetic construct
  source 1..20: mol_type = other RNA
ctcagcctctacccaaagaa

SEQ ID NO: 6273 - RNA, 20 nt, synthetic construct
  source 1..20: mol_type = other RNA
tctcagcctctacccaaaga

SEQ ID NO: 6274 - RNA, 20 nt, synthetic construct
  source 1..20: mol_type = other RNA
ccctgcccttctttgggtag

SEQ ID NO: 6275 - RNA, 20 nt, synthetic construct
  source 1..20: mol_type = other RNA
ttgggtagaggctgagagct

SEQ ID NO: 6276 - RNA, 20 nt, synthetic construct
  source 1..20: mol_type = other RNA
tgggtagaggctgagagctt

SEQ ID NO: 6277 - RNA, 20 nt, synthetic construct
  source 1..20: mol_type = other RNA
gggtagaggctgagagcttg

SEQ ID NO: 6278 - RNA, 20 nt, synthetic construct
  source 1..20: mol_type = other RNA
agccccttagaggactctaa

SEQ ID NO: 6279 - RNA, 20 nt, synthetic construct
  source 1..20: mol_type = other RNA
gagccccttagaggactcta

SEQ ID NO: 6280 - RNA, 20 nt, synthetic construct
  source 1..20: mol_type = other RNA
gggtcccttagagtcctcta

SEQ ID NO: 6281 - RNA, 20 nt, synthetic construct
  source 1..20: mol_type = other RNA
ggtcccttagagtcctctaa

SEQ ID NO: 6282 - RNA, 20 nt, synthetic construct
  source 1..20: mol_type = other RNA
gtcccttagagtcctctaag

SEQ ID NO: 6283 - RNA, 20 nt, synthetic construct
  source 1..20: mol_type = other RNA
aacagtcgtgagccccttag

SEQ ID NO: 6284 - RNA, 20 nt, synthetic construct
  source 1..20: mol_type = other RNA
aaggggctcacgactgtttg

SEQ ID NO: 6285 - RNA, 20 nt, synthetic construct
  source 1..20: mol_type = other RNA
ggctcacgactgtttgtgga

SEQ ID NO: 6286 - RNA, 20 nt, synthetic construct
  source 1..20: mol_type = other RNA
tcacgactgtttgtggaagg

SEQ ID NO: 6287 - RNA, 20 nt, synthetic construct
  source 1..20: mol_type = other RNA
gactgtttgtggaaggtggt

SEQ ID NO: 6288 - RNA, 20 nt, synthetic construct
  source 1..20: mol_type = other RNA
actgtttgtggaaggtggta

SEQ ID NO: 6289 - RNA, 20 nt, synthetic construct
  source 1..20: mol_type = other RNA
ctgtttgtggaaggtggtag

SEQ ID NO: 6290 - RNA, 20 nt, synthetic construct
  source 1..20: mol_type = other RNA
tgtggaaggtggtaggggct

SEQ ID NO: 6291 - RNA, 20 nt, synthetic construct
  source 1..20: mol_type = other RNA
ggagctaacagattgttcat

SEQ ID NO: 6292 - RNA, 20 nt, synthetic construct
  source 1..20: mol_type = other RNA
ggcctccacacggagagctg

SEQ ID NO: 6293 - RNA, 20 nt, synthetic construct
  source 1..20: mol_type = other RNA
gggcctccacacggagagct

SEQ ID NO: 6294 - RNA, 20 nt, synthetic construct
  source 1..20: mol_type = other RNA
agggcctccacacggagagc

SEQ ID NO: 6295 - RNA, 20 nt, synthetic construct
  source 1..20: mol_type = other RNA
ttctgccccagctctccgtg

SEQ ID NO: 6296 - RNA, 20 nt, synthetic construct
  source 1..20: mol_type = other RNA
tgccccagctctccgtgtgg

SEQ ID NO: 6297 - RNA, 20 nt, synthetic construct
  source 1..20: mol_type = other RNA
aggaccctagggcctccaca

SEQ ID NO: 6298 - RNA, 20 nt, synthetic construct
  source 1..20: mol_type = other RNA
gctctccgtgtggaggccct

SEQ ID NO: 6299 - RNA, 20 nt, synthetic construct
  source 1..20: mol_type = other RNA
ctctccgtgtggaggcccta

SEQ ID NO: 6300 - RNA, 20 nt, synthetic construct
  source 1..20: mol_type = other RNA
ctatgctgagcaggacccta

SEQ ID NO: 6301 - RNA, 20 nt, synthetic construct
  source 1..20: mol_type = other RNA
gctatgctgagcaggaccct

SEQ ID NO: 6302 - RNA, 20 nt, synthetic construct
  source 1..20: mol_type = other RNA
ctctgagagctatgctgagc

SEQ ID NO: 6303 - RNA, 20 nt, synthetic construct
  source 1..20: mol_type = other RNA
ccagtcctctccttgtgact

SEQ ID NO: 6304 - RNA, 20 nt, synthetic construct
  source 1..20: mol_type = other RNA
gctctcagagccaagtcaca

SEQ ID NO: 6305 - RNA, 20 nt, synthetic construct
  source 1..20: mol_type = other RNA
cagagccaagtcacaaggag

SEQ ID NO: 6306 - RNA, 20 nt, synthetic construct
  source 1..20: mol_type = other RNA
ccaagtcacaaggagaggac

SEQ ID NO: 6307 - RNA, 20 nt, synthetic construct
  source 1..20: mol_type = other RNA
caagtcacaaggagaggact

SEQ ID NO: 6308 - RNA, 20 nt, synthetic construct
  source 1..20: mol_type = other RNA
aagtcacaaggagaggactg

SEQ ID NO: 6309 - RNA, 20 nt, synthetic construct
  source 1..20: mol_type = other RNA
agtcacaaggagaggactgg

SEQ ID NO: 6310 - RNA, 20 nt, synthetic construct
  source 1..20: mol_type = other RNA
gagaggactgggggactgcc

SEQ ID NO: 6311 - RNA, 20 nt, synthetic construct
  source 1..20: mol_type = other RNA
atcagcaactgctctgtgcc

SEQ ID NO: 6312 - RNA, 20 nt, synthetic construct
  source 1..20: mol_type = other RNA
tgatcaacacagctgcagcc

SEQ ID NO: 6313 - RNA, 20 nt, synthetic construct
  source 1..20: mol_type = other RNA
gatcaacacagctgcagcca

SEQ ID NO: 6314 - RNA, 20 nt, synthetic construct
  source 1..20: mol_type = other RNA
gcttgtcatcttctcagccc

SEQ ID NO: 6315 - RNA, 20 nt, synthetic construct
  source 1..20: mol_type = other RNA
tgacaagcatttcctctgtc

SEQ ID NO: 6316 - RNA, 20 nt, synthetic construct
  source 1..20: mol_type = other RNA
atggatgtctctcctgacag

SEQ ID NO: 6317 - RNA, 20 nt, synthetic construct
  source 1..20: mol_type = other RNA
gggagggccctggagtggca

SEQ ID NO: 6318 - RNA, 20 nt, synthetic construct
  source 1..20: mol_type = other RNA
agagacatccatgccactcc

SEQ ID NO: 6319 - RNA, 20 nt, synthetic construct
  source 1..20: mol_type = other RNA
gagacatccatgccactcca

SEQ ID NO: 6320 - RNA, 20 nt, synthetic construct
  source 1..20: mol_type = other RNA
ggatggggagggccctggag

SEQ ID NO: 6321 - RNA, 20 nt, synthetic construct
  source 1..20: mol_type = other RNA
tcctgggatggggagggccc

SEQ ID NO: 6322 - RNA, 20 nt, synthetic construct
  source 1..20: mol_type = other RNA
gggccttcctgggatgggga

SEQ ID NO: 6323 - RNA, 20 nt, synthetic construct
  source 1..20: mol_type = other RNA
ggggccttcctgggatgggg

SEQ ID NO: 6324 - RNA, 20 nt, synthetic construct
  source 1..20: mol_type = other RNA
tccagggccctccccatccc

SEQ ID NO: 6325 - RNA, 20 nt, synthetic construct
  source 1..20: mol_type = other RNA
ggaggggccttcctgggatg

SEQ ID NO: 6326 - RNA, 20 nt, synthetic construct
  source 1..20: mol_type = other RNA
tggaggggccttcctgggat

SEQ ID NO: 6327 - RNA, 20 nt, synthetic construct
  source 1..20: mol_type = other RNA
ttggaggggccttcctggga

SEQ ID NO: 6328 - RNA, 20 nt, synthetic construct
  source 1..20: mol_type = other RNA
gggccctccccatcccagga

SEQ ID NO: 6329 - RNA, 20 nt, synthetic construct
  source 1..20: mol_type = other RNA
gtgcttggaggggccttcct

SEQ ID NO: 6330 - RNA, 20 nt, synthetic construct
  source 1..20: mol_type = other RNA
ggtgcttggaggggccttcc

SEQ ID NO: 6331 - RNA, 20 nt, synthetic construct
  source 1..20: mol_type = other RNA
tagagactgggtgcttggag

SEQ ID NO: 6332 - RNA, 20 nt, synthetic construct
  source 1..20: mol_type = other RNA
ttagagactgggtgcttgga

SEQ ID NO: 6333 - RNA, 20 nt, synthetic construct
  source 1..20: mol_type = other RNA
gttagagactgggtgcttgg

SEQ ID NO: 6334 - RNA, 20 nt, synthetic construct
  source 1..20: mol_type = other RNA
tgtgttagagactgggtgct

SEQ ID NO: 6335 - RNA, 20 nt, synthetic construct
  source 1..20: mol_type = other RNA
agtgggctgtgttagagact

SEQ ID NO: 6336 - RNA, 20 nt, synthetic construct
  source 1..20: mol_type = other RNA
aagtgggctgtgttagagac

SEQ ID NO: 6337 - RNA, 20 nt, synthetic construct
  source 1..20: mol_type = other RNA
gggctcagctgtgaggaagt

SEQ ID NO: 6338 - RNA, 20 nt, synthetic construct
  source 1..20: mol_type = other RNA
ggggctcagctgtgaggaag

SEQ ID NO: 6339 - RNA, 20 nt, synthetic construct
  source 1..20: mol_type = other RNA
cagtggggggctcagctgtg

SEQ ID NO: 6340 - RNA, 20 nt, synthetic construct
  source 1..20: mol_type = other RNA
ctgccagtcaccacagtggg

SEQ ID NO: 6341 - RNA, 20 nt, synthetic construct
  source 1..20: mol_type = other RNA
cacagctgagccccccactg

SEQ ID NO: 6342 - RNA, 20 nt, synthetic construct
  source 1..20: mol_type = other RNA
actgccagtcaccacagtgg

SEQ ID NO: 6343 - RNA, 20 nt, synthetic construct
  source 1..20: mol_type = other RNA
gactgccagtcaccacagtg

SEQ ID NO: 6344 - RNA, 20 nt, synthetic construct
  source 1..20: mol_type = other RNA
agactgccagtcaccacagt

SEQ ID NO: 6345 - RNA, 20 nt, synthetic construct
  source 1..20: mol_type = other RNA
gagactgccagtcaccacag

SEQ ID NO: 6346 - RNA, 20 nt, synthetic construct
  source 1..20: mol_type = other RNA
gagccccccactgtggtgac

SEQ ID NO: 6347 - RNA, 20 nt, synthetic construct
  source 1..20: mol_type = other RNA
ggtgactggcagtctcctag

SEQ ID NO: 6348 - RNA, 20 nt, synthetic construct
  source 1..20: mol_type = other RNA
gtgactggcagtctcctagt

SEQ ID NO: 6349 - RNA, 20 nt, synthetic construct
  source 1..20: mol_type = other RNA
agtcgctcactggtcccact

SEQ ID NO: 6350 - RNA, 20 nt, synthetic construct
  source 1..20: mol_type = other RNA
agggtggagcagtcgctcac

SEQ ID NO: 6351 - RNA, 20 nt, synthetic construct
  source 1..20: mol_type = other RNA
cagtggcaggcagggcaggg

SEQ ID NO: 6352 - RNA, 20 nt, synthetic construct
  source 1..20: mol_type = other RNA
aggcagtggcaggcagggca

SEQ ID NO: 6353 - RNA, 20 nt, synthetic construct
  source 1..20: mol_type = other RNA
caggcagtggcaggcagggc

SEQ ID NO: 6354 - RNA, 20 nt, synthetic construct
  source 1..20: mol_type = other RNA
agcgcaggcagtggcaggca

SEQ ID NO: 6355 - RNA, 20 nt, synthetic construct
  source 1..20: mol_type = other RNA
cagcgcaggcagtggcaggc

SEQ ID NO: 6356 - RNA, 20 nt, synthetic construct
  source 1..20: mol_type = other RNA
tgaacagcgcaggcagtggc

SEQ ID NO: 6357 - RNA, 20 nt, synthetic construct
  source 1..20: mol_type = other RNA
tggttgaacagcgcaggcag

SEQ ID NO: 6358 - RNA, 20 nt, synthetic construct
  source 1..20: mol_type = other RNA
ggctcctggttgaacagcgc

SEQ ID NO: 6359 - RNA, 20 nt, synthetic construct
  source 1..20: mol_type = other RNA
actgcctgcgctgttcaacc

SEQ ID NO: 6360 - RNA, 20 nt, synthetic construct
  source 1..20: mol_type = other RNA
tctggccggaggctggctcc

SEQ ID NO: 6361 - RNA, 20 nt, synthetic construct
  source 1..20: mol_type = other RNA
ttcaaccaggagccagcctc

SEQ ID NO: 6362 - RNA, 20 nt, synthetic construct
  source 1..20: mol_type = other RNA
aggcgcatctggccggaggc

SEQ ID NO: 6363 - RNA, 20 nt, synthetic construct
  source 1..20: mol_type = other RNA
ctccaggcgcatctggccgg

SEQ ID NO: 6364 - RNA, 20 nt, synthetic construct
  source 1..20: mol_type = other RNA
tttctccaggcgcatctggc

SEQ ID NO: 6365 - RNA, 20 nt, synthetic construct
  source 1..20: mol_type = other RNA
cggttttctccaggcgcatc

SEQ ID NO: 6366 - RNA, 20 nt, synthetic construct
  source 1..20: mol_type = other RNA
agcctccggccagatgcgcc

SEQ ID NO: 6367 - RNA, 20 nt, synthetic construct
  source 1..20: mol_type = other RNA
gaatctggtcggttttctcc

SEQ ID NO: 6368 - RNA, 20 nt, synthetic construct
  source 1..20: mol_type = other RNA
taacatactgggaatctggt

SEQ ID NO: 6369 - RNA, 20 nt, synthetic construct
  source 1..20: mol_type = other RNA
cccctaacatactgggaatc

SEQ ID NO: 6370 - RNA, 20 nt, synthetic construct
  source 1..20: mol_type = other RNA
tccaagccccctaacatact

SEQ ID NO: 6371 - RNA, 20 nt, synthetic construct
  source 1..20: mol_type = other RNA
ctccaagccccctaacatac

SEQ ID NO: 6372 - RNA, 20 nt, synthetic construct
  source 1..20: mol_type = other RNA
gaccagattcccagtatgtt

SEQ ID NO: 6373 - RNA, 20 nt, synthetic construct
  source 1..20: mol_type = other RNA
accagattcccagtatgtta

SEQ ID NO: 6374 - RNA, 20 nt, synthetic construct
  source 1..20: mol_type = other RNA
ccagattcccagtatgttag

SEQ ID NO: 6375 - RNA, 20 nt, synthetic construct
  source 1..20: mol_type = other RNA
cagattcccagtatgttagg

SEQ ID NO: 6376 - RNA, 20 nt, synthetic construct
  source 1..20: mol_type = other RNA
tcccagtatgttagggggct

SEQ ID NO: 6377 - RNA, 20 nt, synthetic construct
  source 1..20: mol_type = other RNA
gttagggggcttggagagag

SEQ ID NO: 6378 - RNA, 20 nt, synthetic construct
  source 1..20: mol_type = other RNA
ttagggggcttggagagagt

SEQ ID NO: 6379 - RNA, 20 nt, synthetic construct
  source 1..20: mol_type = other RNA
agagtgggctttctccctct

SEQ ID NO: 6380 - RNA, 20 nt, synthetic construct
  source 1..20: mol_type = other RNA
gagtgggctttctccctctt

SEQ ID NO: 6381 - RNA, 20 nt, synthetic construct
  source 1..20: mol_type = other RNA
tccttatccacctcccaaga

SEQ ID NO: 6382 - RNA, 20 nt, synthetic construct
  source 1..20: mol_type = other RNA
tgggctttctccctcttggg

SEQ ID NO: 6383 - RNA, 20 nt, synthetic construct
  source 1..20: mol_type = other RNA
ctccttatccacctcccaag

SEQ ID NO: 6384 - RNA, 20 nt, synthetic construct
  source 1..20: mol_type = other RNA
gctttctccctcttgggagg

SEQ ID NO: 6385 - RNA, 20 nt, synthetic construct
  source 1..20: mol_type = other RNA
tccctcttgggaggtggata

SEQ ID NO: 6386 - RNA, 20 nt, synthetic construct
  source 1..20: mol_type = other RNA
tggataaggagttgacacta

SEQ ID NO: 6387 - RNA, 20 nt, synthetic construct
  source 1..20: mol_type = other RNA
taaggagttgacactaaggc

SEQ ID NO: 6388 - RNA, 20 nt, synthetic construct
  source 1..20: mol_type = other RNA
aaggagttgacactaaggca

SEQ ID NO: 6389 - RNA, 20 nt, synthetic construct
  source 1..20: mol_type = other RNA
acactaaggcagggactgtc

SEQ ID NO: 6390 - RNA, 20 nt, synthetic construct
  source 1..20: mol_type = other RNA
aggcagggactgtcaggaac

SEQ ID NO: 6391 - RNA, 20 nt, synthetic construct
  source 1..20: mol_type = other RNA
gatagggttggggagaggtg

SEQ ID NO: 6392 - RNA, 20 nt, synthetic construct
  source 1..20: mol_type = other RNA
acactgatagggttggggag

SEQ ID NO: 6393 - RNA, 20 nt, synthetic construct
  source 1..20: mol_type = other RNA
gagtgacactgatagggttg

SEQ ID NO: 6394 - RNA, 20 nt, synthetic construct
  source 1..20: mol_type = other RNA
tgagtgacactgatagggtt

SEQ ID NO: 6395 - RNA, 20 nt, synthetic construct
  source 1..20: mol_type = other RNA
gtgagtgacactgatagggt

SEQ ID NO: 6396 - RNA, 20 nt, synthetic construct
  source 1..20: mol_type = other RNA
agaggtgagtgacactgata

SEQ ID NO: 6397 - RNA, 20 nt, synthetic construct
  source 1..20: mol_type = other RNA
cagaggtgagtgacactgat

SEQ ID NO: 6398 - RNA, 20 nt, synthetic construct
  source 1..20: mol_type = other RNA
gataaaactggctggggcag

SEQ ID NO: 6399 - RNA, 20 nt, synthetic construct
  source 1..20: mol_type = other RNA
cccaaggataaaactggctg

SEQ ID NO: 6400 - RNA, 20 nt, synthetic construct
  source 1..20: mol_type = other RNA
ccccaaggataaaactggct

SEQ ID NO: 6401 - RNA, 20 nt, synthetic construct
  source 1..20: mol_type = other RNA
gccccaaggataaaactggc

SEQ ID NO: 6402 - RNA, 20 nt, synthetic construct
  source 1..20: mol_type = other RNA
gggggccccaaggataaaac

SEQ ID NO: 6403 - RNA, 20 nt, synthetic construct
  source 1..20: mol_type = other RNA
gccccagccagttttatcct

SEQ ID NO: 6404 - RNA, 20 nt, synthetic construct
  source 1..20: mol_type = other RNA
ccccagccagttttatcctt

SEQ ID NO: 6405 - RNA, 20 nt, synthetic construct
  source 1..20: mol_type = other RNA
cccagccagttttatccttg

SEQ ID NO: 6406 - RNA, 20 nt, synthetic construct
  source 1..20: mol_type = other RNA
ttgagctgacgggggcccca

SEQ ID NO: 6407 - RNA, 20 nt, synthetic construct
  source 1..20: mol_type = other RNA
gccagggattgagctgacgg

SEQ ID NO: 6408 - RNA, 20 nt, synthetic construct
  source 1..20: mol_type = other RNA
tgccagggattgagctgacg

SEQ ID NO: 6409 - RNA, 20 nt, synthetic construct
  source 1..20: mol_type = other RNA
ctgccagggattgagctgac

SEQ ID NO: 6410 - RNA, 20 nt, synthetic construct
  source 1..20: mol_type = other RNA
tctgccagggattgagctga

SEQ ID NO: 6411 - RNA, 20 nt, synthetic construct
  source 1..20: mol_type = other RNA
gcccccgtcagctcaatccc

SEQ ID NO: 6412 - RNA, 20 nt, synthetic construct
  source 1..20: mol_type = other RNA
ctgaggcatgttctctgcca

SEQ ID NO: 6413 - RNA, 20 nt, synthetic construct
  source 1..20: mol_type = other RNA
tctgaggcatgttctctgcc

SEQ ID NO: 6414 - RNA, 20 nt, synthetic construct
  source 1..20: mol_type = other RNA
ggcagagaacatgcctcaga

SEQ ID NO: 6415 - RNA, 20 nt, synthetic construct
  source 1..20: mol_type = other RNA
cacggatgtgtttccttctg

SEQ ID NO: 6416 - RNA, 20 nt, synthetic construct
  source 1..20: mol_type = other RNA
attccctcctgatgctcgca

SEQ ID NO: 6417 - RNA, 20 nt, synthetic construct
  source 1..20: mol_type = other RNA
aacacatccgtgcgagcatc

SEQ ID NO: 6418 - RNA, 20 nt, synthetic construct
  source 1..20: mol_type = other RNA
acatccgtgcgagcatcagg

SEQ ID NO: 6419 - RNA, 20 nt, synthetic construct
  source 1..20: mol_type = other RNA
catccgtgcgagcatcagga

SEQ ID NO: 6420 - RNA, 20 nt, synthetic construct
  source 1..20: mol_type = other RNA
caggtgaatgctctaattgg

SEQ ID NO: 6421 - RNA, 20 nt, synthetic construct
  source 1..20: mol_type = other RNA
tggcaggtgaatgctctaat

SEQ ID NO: 6422 - RNA, 20 nt, synthetic construct
  source 1..20: mol_type = other RNA
gatgaacgaataaggctggc

SEQ ID NO: 6423 - RNA, 20 nt, synthetic construct
  source 1..20: mol_type = other RNA
agctgatgaacgaataaggc

SEQ ID NO: 6424 - RNA, 20 nt, synthetic construct
  source 1..20: mol_type = other RNA
gaagagctgatgaacgaata

SEQ ID NO: 6425 - RNA, 20 nt, synthetic construct
  source 1..20: mol_type = other RNA
attcgttcatcagctcttca

SEQ ID NO: 6426 - RNA, 20 nt, synthetic construct
  source 1..20: mol_type = other RNA
gagcagttggcacagagaag

SEQ ID NO: 6427 - RNA, 20 nt, synthetic construct
  source 1..20: mol_type = other RNA
agagcagttggcacagagaa

SEQ ID NO: 6428 - RNA, 20 nt, synthetic construct
  source 1..20: mol_type = other RNA
cagagcagttggcacagaga

SEQ ID NO: 6429 - RNA, 20 nt, synthetic construct
  source 1..20: mol_type = other RNA
ttagcacctagcagagcagt

SEQ ID NO: 6430 - RNA, 20 nt, synthetic construct
  source 1..20: mol_type = other RNA
tctgtgccaactgctctgct

SEQ ID NO: 6431 - RNA, 20 nt, synthetic construct
  source 1..20: mol_type = other RNA
taggtgctaagaattccatc

SEQ ID NO: 6432 - RNA, 20 nt, synthetic construct
  source 1..20: mol_type = other RNA
aggtgctaagaattccatca

SEQ ID NO: 6433 - RNA, 20 nt, synthetic construct
  source 1..20: mol_type = other RNA
ctgtttctgtcctgccctga

SEQ ID NO: 6434 - RNA, 20 nt, synthetic construct
  source 1..20: mol_type = other RNA
gctaagaattccatcagggc

SEQ ID NO: 6435 - RNA, 20 nt, synthetic construct
  source 1..20: mol_type = other RNA
cagaaacagctactgctctt

SEQ ID NO: 6436 - RNA, 20 nt, synthetic construct
  source 1..20: mol_type = other RNA
agaaacagctactgctctta

SEQ ID NO: 6437 - RNA, 20 nt, synthetic construct
  source 1..20: mol_type = other RNA
ctactgctcttagggaaatt

SEQ ID NO: 6438 - RNA, 20 nt, synthetic construct
  source 1..20: mol_type = other RNA
tactgctcttagggaaatta

SEQ ID NO: 6439 - RNA, 20 nt, synthetic construct
  source 1..20: mol_type = other RNA
tagggaaattagggcccttt

SEQ ID NO: 6440 - RNA, 20 nt, synthetic construct
  source 1..20: mol_type = other RNA
agggaaattagggcccttta

SEQ ID NO: 6441 - RNA, 20 nt, synthetic construct
  source 1..20: mol_type = other RNA
gggaaattagggccctttag

SEQ ID NO: 6442 - RNA, 20 nt, synthetic construct
  source 1..20: mol_type = other RNA
ggaaattagggccctttagg

SEQ ID NO: 6443 - RNA, 20 nt, synthetic construct
  source 1..20: mol_type = other RNA
taatgtctgacccccctaaa

SEQ ID NO: 6444 - RNA, 20 nt, synthetic construct
  source 1..20: mol_type = other RNA
gaaattagggccctttaggg

SEQ ID NO: 6445 - RNA, 20 nt, synthetic construct
  source 1..20: mol_type = other RNA
ttaatgtctgacccccctaa

SEQ ID NO: 6446 - RNA, 20 nt, synthetic construct
  source 1..20: mol_type = other RNA
aaaagcagaatcgcaaacac

SEQ ID NO: 6447 - RNA, 20 nt, synthetic construct
  source 1..20: mol_type = other RNA
agagacaaaggcagtgaggt

SEQ ID NO: 6448 - RNA, 20 nt, synthetic construct
  source 1..20: mol_type = other RNA
aagagacaaaggcagtgagg

SEQ ID NO: 6449 - RNA, 20 nt, synthetic construct
  source 1..20: mol_type = other RNA
tgcaagagacaaaggcagtg

SEQ ID NO: 6450 - RNA, 20 nt, synthetic construct
  source 1..20: mol_type = other RNA
aaaggcactgcaagagacaa

SEQ ID NO: 6451 - RNA, 20 nt, synthetic construct
  source 1..20: mol_type = other RNA
ctcaacgaggaactggagaa

SEQ ID NO: 6452 - RNA, 20 nt, synthetic construct
  source 1..20: mol_type = other RNA
caggcagctcaacgaggaac

SEQ ID NO: 6453 - RNA, 20 nt, synthetic construct
  source 1..20: mol_type = other RNA
gagattcaggcagctcaacg

SEQ ID NO: 6454 - RNA, 20 nt, synthetic construct
  source 1..20: mol_type = other RNA
tgggtccctcagggagattc

SEQ ID NO: 6455 - RNA, 20 nt, synthetic construct
  source 1..20: mol_type = other RNA
gagctgcctgaatctccctg

SEQ ID NO: 6456 - RNA, 20 nt, synthetic construct
  source 1..20: mol_type = other RNA
agctgcctgaatctccctga

SEQ ID NO: 6457 - RNA, 20 nt, synthetic construct
  source 1..20: mol_type = other RNA
caaactggatgggtccctca

SEQ ID NO: 6458 - RNA, 20 nt, synthetic construct
  source 1..20: mol_type = other RNA
acaaactggatgggtccctc

SEQ ID NO: 6459 - RNA, 20 nt, synthetic construct
  source 1..20: mol_type = other RNA
atggtggggacaaactggat

SEQ ID NO: 6460 - RNA, 20 nt, synthetic construct
  source 1..20: mol_type = other RNA
gatggtggggacaaactgga

SEQ ID NO: 6461 - RNA, 20 nt, synthetic construct
  source 1..20: mol_type = other RNA
tggagatggtggggacaaac

SEQ ID NO: 6462 - RNA, 20 nt, synthetic construct
  source 1..20: mol_type = other RNA
ggggcagagtggagatggtg

SEQ ID NO: 6463 - RNA, 20 nt, synthetic construct
  source 1..20: mol_type = other RNA
tggggcagagtggagatggt

SEQ ID NO: 6464 - RNA, 20 nt, synthetic construct
  source 1..20: mol_type = other RNA
atggggcagagtggagatgg

SEQ ID NO: 6465 - RNA, 20 nt, synthetic construct
  source 1..20: mol_type = other RNA
cccatggggcagagtggaga

SEQ ID NO: 6466 - RNA, 20 nt, synthetic construct
  source 1..20: mol_type = other RNA
ccagagcccatggggcagag

SEQ ID NO: 6467 - RNA, 20 nt, synthetic construct
  source 1..20: mol_type = other RNA
accatctccactctgcccca

SEQ ID NO: 6468 - RNA, 20 nt, synthetic construct
  source 1..20: mol_type = other RNA
ccatctccactctgccccat

SEQ ID NO: 6469 - RNA, 20 nt, synthetic construct
  source 1..20: mol_type = other RNA
gagatttgccagagcccatg

SEQ ID NO: 6470 - RNA, 20 nt, synthetic construct
  source 1..20: mol_type = other RNA
agagatttgccagagcccat

SEQ ID NO: 6471 - RNA, 20 nt, synthetic construct
  source 1..20: mol_type = other RNA
cagagatttgccagagccca

SEQ ID NO: 6472 - RNA, 20 nt, synthetic construct
  source 1..20: mol_type = other RNA
ccactctgccccatgggctc

SEQ ID NO: 6473 - RNA, 20 nt, synthetic construct
  source 1..20: mol_type = other RNA
tgggctctggcaaatctctg

SEQ ID NO: 6474 - RNA, 20 nt, synthetic construct
  source 1..20: mol_type = other RNA
ctctggcaaatctctgaggc

SEQ ID NO: 6475 - RNA, 20 nt, synthetic construct
  source 1..20: mol_type = other RNA
caaatctctgaggctggaac

SEQ ID NO: 6476 - RNA, 20 nt, synthetic construct
  source 1..20: mol_type = other RNA
aaatctctgaggctggaaca

SEQ ID NO: 6477 - RNA, 20 nt, synthetic construct
  source 1..20: mol_type = other RNA
aatctctgaggctggaacag

SEQ ID NO: 6478 - RNA, 20 nt, synthetic construct
  source 1..20: mol_type = other RNA
accatggtagatgaatatac

SEQ ID NO: 6479 - RNA, 20 nt, synthetic construct
  source 1..20: mol_type = other RNA
tccagtatattcatctacca

SEQ ID NO: 6480 - RNA, 20 nt, synthetic construct
  source 1..20: mol_type = other RNA
gccaggccccgcactcacca

SEQ ID NO: 6481 - RNA, 20 nt, synthetic construct
  source 1..20: mol_type = other RNA
ttcatctaccatggtgagtg

SEQ ID NO: 6482 - RNA, 20 nt, synthetic construct
  source 1..20: mol_type = other RNA
tcatctaccatggtgagtgc

SEQ ID NO: 6483 - RNA, 20 nt, synthetic construct
  source 1..20: mol_type = other RNA
catctaccatggtgagtgcg

SEQ ID NO: 6484 - RNA, 20 nt, synthetic construct
  source 1..20: mol_type = other RNA
accatggtgagtgcggggcc

SEQ ID NO: 6485 - RNA, 20 nt, synthetic construct
  source 1..20: mol_type = other RNA
ggagaggtggtcggggagcc

SEQ ID NO: 6486 - RNA, 20 nt, synthetic construct
  source 1..20: mol_type = other RNA
gtaggagggagaggtggtcg

SEQ ID NO: 6487 - RNA, 20 nt, synthetic construct
  source 1..20: mol_type = other RNA
ggtaggagggagaggtggtc

SEQ ID NO: 6488 - RNA, 20 nt, synthetic construct
  source 1..20: mol_type = other RNA
aggtaggagggagaggtggt

SEQ ID NO: 6489 - RNA, 20 nt, synthetic construct
  source 1..20: mol_type = other RNA
agtcaggtaggagggagagg

SEQ ID NO: 6490 - RNA, 20 nt, synthetic construct
  source 1..20: mol_type = other RNA
agcagtcaggtaggagggag

SEQ ID NO: 6491 - RNA, 20 nt, synthetic construct
  source 1..20: mol_type = other RNA
cagggagcagtcaggtagga

SEQ ID NO: 6492 - RNA, 20 nt, synthetic construct
  source 1..20: mol_type = other RNA
tcagggagcagtcaggtagg

SEQ ID NO: 6493 - RNA, 20 nt, synthetic construct
  source 1..20: mol_type = other RNA
aggtcagggagcagtcaggt

SEQ ID NO: 6494 - RNA, 20 nt, synthetic construct
  source 1..20: mol_type = other RNA
gatgaggtcagggagcagtc

SEQ ID NO: 6495 - RNA, 20 nt, synthetic construct
  source 1..20: mol_type = other RNA
gtatggggaggatgaggtca

SEQ ID NO: 6496 - RNA, 20 nt, synthetic construct
  source 1..20: mol_type = other RNA
agtatggggaggatgaggtc

SEQ ID NO: 6497 - RNA, 20 nt, synthetic construct
  source 1..20: mol_type = other RNA
catggagtatggggaggatg

SEQ ID NO: 6498 - RNA, 20 nt, synthetic construct
  source 1..20: mol_type = other RNA
caagtgcatggagtatgggg

SEQ ID NO: 6499 - RNA, 20 nt, synthetic construct
  source 1..20: mol_type = other RNA
tgccaagtgcatggagtatg

SEQ ID NO: 6500 - RNA, 20 nt, synthetic construct
  source 1..20: mol_type = other RNA
ctgccaagtgcatggagtat

SEQ ID NO: 6501 - RNA, 20 nt, synthetic construct
  source 1..20: mol_type = other RNA
actgccaagtgcatggagta

SEQ ID NO: 6502 - RNA, 20 nt, synthetic construct
  source 1..20: mol_type = other RNA
ctccccatactccatgcact

SEQ ID NO: 6503 - RNA, 20 nt, synthetic construct
  source 1..20: mol_type = other RNA
gggcaccactgccaagtgca

SEQ ID NO: 6504 - RNA, 20 nt, synthetic construct
  source 1..20: mol_type = other RNA
atactccatgcacttggcag

SEQ ID NO: 6505 - RNA, 20 nt, synthetic construct
  source 1..20: mol_type = other RNA
aggatcatgagaaggtgcta

SEQ ID NO: 6506 - RNA, 20 nt, synthetic construct
  source 1..20: mol_type = other RNA
gaggatcatgagaaggtgct

SEQ ID NO: 6507 - RNA, 20 nt, synthetic construct
  source 1..20: mol_type = other RNA
ggggagggaggatcatgaga

SEQ ID NO: 6508 - RNA, 20 nt, synthetic construct
  source 1..20: mol_type = other RNA
gaaagttgtgctggggaggg

SEQ ID NO: 6509 - RNA, 20 nt, synthetic construct
  source 1..20: mol_type = other RNA
agagaaagttgtgctgggga

SEQ ID NO: 6510 - RNA, 20 nt, synthetic construct
  source 1..20: mol_type = other RNA
cagagaaagttgtgctgggg

SEQ ID NO: 6511 - RNA, 20 nt, synthetic construct
  source 1..20: mol_type = other RNA
ggacagagaaagttgtgctg

SEQ ID NO: 6512 - RNA, 20 nt, synthetic construct
  source 1..20: mol_type = other RNA
gggacagagaaagttgtgct

SEQ ID NO: 6513 - RNA, 20 nt, synthetic construct
  source 1..20: mol_type = other RNA
agggacagagaaagttgtgc

SEQ ID NO: 6514 - RNA, 20 nt, synthetic construct
  source 1..20: mol_type = other RNA
gctttgatttttgggaaata

SEQ ID NO: 6515 - RNA, 20 nt, synthetic construct
  source 1..20: mol_type = other RNA
tgctttgatttttgggaaat

SEQ ID NO: 6516 - RNA, 20 nt, synthetic construct
  source 1..20: mol_type = other RNA
gctcttctgctttgattttt

SEQ ID NO: 6517 - RNA, 20 nt, synthetic construct
  source 1..20: mol_type = other RNA
tgctcttctgctttgatttt

SEQ ID NO: 6518 - RNA, 20 nt, synthetic construct
  source 1..20: mol_type = other RNA
cagaagagcagagattcctg

SEQ ID NO: 6519 - RNA, 20 nt, synthetic construct
  source 1..20: mol_type = other RNA
aagagcagagattcctgagg

SEQ ID NO: 6520 - RNA, 20 nt, synthetic construct
  source 1..20: mol_type = other RNA
tcatgcacccagaccacctc

SEQ ID NO: 6521 - RNA, 20 nt, synthetic construct
  source 1..20: mol_type = other RNA
cagagattcctgaggtggtc

SEQ ID NO: 6522 - RNA, 20 nt, synthetic construct
  source 1..20: mol_type = other RNA
agagattcctgaggtggtct

SEQ ID NO: 6523 - RNA, 20 nt, synthetic construct
  source 1..20: mol_type = other RNA
tctgggtgcatgaccaagag

SEQ ID NO: 6524 - RNA, 20 nt, synthetic construct
  source 1..20: mol_type = other RNA
gaaggccacacaaccactct

SEQ ID NO: 6525 - RNA, 20 nt, synthetic construct
  source 1..20: mol_type = other RNA
catgaccaagagtggttgtg

SEQ ID NO: 6526 - RNA, 20 nt, synthetic construct
  source 1..20: mol_type = other RNA
aggggaaagcaacatatgga

SEQ ID NO: 6527 - RNA, 20 nt, synthetic construct
  source 1..20: mol_type = other RNA
cagaaggggaaagcaacata

SEQ ID NO: 6528 - RNA, 20 nt, synthetic construct
  source 1..20: mol_type = other RNA
gaaaaactaagggtcagaag

SEQ ID NO: 6529 - RNA, 20 nt, synthetic construct
  source 1..20: mol_type = other RNA
ggaaaaactaagggtcagaa

SEQ ID NO: 6530 - RNA, 20 nt, synthetic construct
  source 1..20: mol_type = other RNA
aggaaaaactaagggtcaga

SEQ ID NO: 6531 - RNA, 20 nt, synthetic construct
  source 1..20: mol_type = other RNA
aaaaaataaggaaaaactaa

SEQ ID NO: 6532 - RNA, 20 nt, synthetic construct
  source 1..20: mol_type = other RNA
aaaaaaataaggaaaaacta

SEQ ID NO: 6533 - RNA, 20 nt, synthetic construct
  source 1..20: mol_type = other RNA
aaaaacatttaaaaaaaata

SEQ ID NO: 6534 - RNA, 20 nt, synthetic construct
  source 1..20: mol_type = other RNA
gtatactgatgtgaatagtt

SEQ ID NO: 6535 - RNA, 20 nt, synthetic construct
  source 1..20: mol_type = other RNA
aaatcagagaaagctatgca

SEQ ID NO: 6536 - RNA, 20 nt, synthetic construct
  source 1..20: mol_type = other RNA
tagggaccattttactgatt

SEQ ID NO: 6537 - RNA, 20 nt, synthetic construct
  source 1..20: mol_type = other RNA
ttgtttcctaatcagtaaaa

SEQ ID NO: 6538 - RNA, 20 nt, synthetic construct
  source 1..20: mol_type = other RNA
ctcagtgtggtgggtcagta

SEQ ID NO: 6539 - RNA, 20 nt, synthetic construct
  source 1..20: mol_type = other RNA
cctcagtgtggtgggtcagt

SEQ ID NO: 6540 - RNA, 20 nt, synthetic construct
  source 1..20: mol_type = other RNA
tcacaacccctcagtgtggt

SEQ ID NO: 6541 - RNA, 20 nt, synthetic construct
  source 1..20: mol_type = other RNA
gtcacaacccctcagtgtgg

SEQ ID NO: 6542 - RNA, 20 nt, synthetic construct
  source 1..20: mol_type = other RNA
cctactgacccaccacactg

SEQ ID NO: 6543 - RNA, 20 nt, synthetic construct
  source 1..20: mol_type = other RNA
ctactgacccaccacactga

SEQ ID NO: 6544 - RNA, 20 nt, synthetic construct
  source 1..20: mol_type = other RNA
caagtcacaacccctcagtg

SEQ ID NO: 6545 - RNA, 20 nt, synthetic construct
  source 1..20: mol_type = other RNA
tactgacccaccacactgag

SEQ ID NO: 6546 - RNA, 20 nt, synthetic construct
  source 1..20: mol_type = other RNA
gaggggttgtgacttgtctc

SEQ ID NO: 6547 - RNA, 20 nt, synthetic construct
  source 1..20: mol_type = other RNA
aggggttgtgacttgtctca

SEQ ID NO: 6548 - RNA, 20 nt, synthetic construct
  source 1..20: mol_type = other RNA
gttgtgacttgtctcaggga

SEQ ID NO: 6549 - RNA, 20 nt, synthetic construct
  source 1..20: mol_type = other RNA
tgtctcagggaaggtgtgtt

SEQ ID NO: 6550 - RNA, 20 nt, synthetic construct
  source 1..20: mol_type = other RNA
gtctcagggaaggtgtgttt

SEQ ID NO: 6551 - RNA, 20 nt, synthetic construct
  source 1..20: mol_type = other RNA
gaaggtgtgtttgggctgtc

SEQ ID NO: 6552 - RNA, 20 nt, synthetic construct
  source 1..20: mol_type = other RNA
aaggtgtgtttgggctgtca

SEQ ID NO: 6553 - RNA, 20 nt, synthetic construct
  source 1..20: mol_type = other RNA
gggctgtcagggatgagacc

SEQ ID NO: 6554 - RNA, 20 nt, synthetic construct
  source 1..20: mol_type = other RNA
ctgtcagggatgagaccagg

SEQ ID NO: 6555 - RNA, 20 nt, synthetic construct
  source 1..20: mol_type = other RNA
cttgagtggaagcatcctcc

SEQ ID NO: 6556 - RNA, 20 nt, synthetic construct
  source 1..20: mol_type = other RNA
atggatgctctggacttgag

SEQ ID NO: 6557 - RNA, 20 nt, synthetic construct
  source 1..20: mol_type = other RNA
gcaaccaggaatggatgctc

SEQ ID NO: 6558 - RNA, 20 nt, synthetic construct
  source 1..20: mol_type = other RNA
aagtccagagcatccattcc

SEQ ID NO: 6559 - RNA, 20 nt, synthetic construct
  source 1..20: mol_type = other RNA
aactgtcttgcaaccaggaa

SEQ ID NO: 6560 - RNA, 20 nt, synthetic construct
  source 1..20: mol_type = other RNA
actgaaactgtcttgcaacc

SEQ ID NO: 6561 - RNA, 20 nt, synthetic construct
  source 1..20: mol_type = other RNA
acagtttcagtataacgcac

SEQ ID NO: 6562 - RNA, 20 nt, synthetic construct
  source 1..20: mol_type = other RNA
tgctcattttcctagatatc

SEQ ID NO: 6563 - RNA, 20 nt, synthetic construct
  source 1..20: mol_type = other RNA
agaagcagttcctgatatct

SEQ ID NO: 6564 - RNA, 20 nt, synthetic construct
  source 1..20: mol_type = other RNA
atgagcactgaccacacagc

SEQ ID NO: 6565 - RNA, 20 nt, synthetic construct
  source 1..20: mol_type = other RNA
attgcactcttcctgctgtg

SEQ ID NO: 6566 - RNA, 20 nt, synthetic construct
  source 1..20: mol_type = other RNA
gctcataaggaacttagggc

SEQ ID NO: 6567 - RNA, 20 nt, synthetic construct
  source 1..20: mol_type = other RNA
attagctcataaggaactta

SEQ ID NO: 6568 - RNA, 20 nt, synthetic construct
  source 1..20: mol_type = other RNA
aattagctcataaggaactt

SEQ ID NO: 6569 - RNA, 20 nt, synthetic construct
  source 1..20: mol_type = other RNA
atgggtgcaattagctcata

SEQ ID NO: 6570 - RNA, 20 nt, synthetic construct
  source 1..20: mol_type = other RNA
gcttttccaatctgtgaaat

SEQ ID NO: 6571 - RNA, 20 nt, synthetic construct
  source 1..20: mol_type = other RNA
tgcttttccaatctgtgaaa

SEQ ID NO: 6572 - RNA, 20 nt, synthetic construct
  source 1..20: mol_type = other RNA
attgcacccatttcacagat

SEQ ID NO: 6573 - RNA, 20 nt, synthetic construct
  source 1..20: mol_type = other RNA
tttcacagattggaaaagca

SEQ ID NO: 6574 - RNA, 20 nt, synthetic construct
  source 1..20: mol_type = other RNA
gattggaaaagcaaggttcc

SEQ ID NO: 6575 - RNA, 20 nt, synthetic construct
  source 1..20: mol_type = other RNA
ctggagttacatctagctcc

SEQ ID NO: 6576 - RNA, 20 nt, synthetic construct
  source 1..20: mol_type = other RNA
cagagctgaagaaagagctc

SEQ ID NO: 6577 - RNA, 20 nt, synthetic construct
  source 1..20: mol_type = other RNA
cttccaaaggaagatatttc

SEQ ID NO: 6578 - RNA, 20 nt, synthetic construct
  source 1..20: mol_type = other RNA
tgtcctgaaatatcttcctt

SEQ ID NO: 6579 - RNA, 20 nt, synthetic construct
  source 1..20: mol_type = other RNA
gaagagagtagaacttccaa

SEQ ID NO: 6580 - RNA, 20 nt, synthetic construct
  source 1..20: mol_type = other RNA
gctgtggagctcaggaagtc

SEQ ID NO: 6581 - RNA, 20 nt, synthetic construct
  source 1..20: mol_type = other RNA
caaactgggctgtggagctc

SEQ ID NO: 6582 - RNA, 20 nt, synthetic construct
  source 1..20: mol_type = other RNA
ccctactccaaactgggctg

SEQ ID NO: 6583 - RNA, 20 nt, synthetic construct
  source 1..20: mol_type = other RNA
ctgagctccacagcccagtt

SEQ ID NO: 6584 - RNA, 20 nt, synthetic construct
  source 1..20: mol_type = other RNA
ggtcacccctactccaaact

SEQ ID NO: 6585 - RNA, 20 nt, synthetic construct
  source 1..20: mol_type = other RNA
gggtcacccctactccaaac

SEQ ID NO: 6586 - RNA, 20 nt, synthetic construct
  source 1..20: mol_type = other RNA
tccacagcccagtttggagt

SEQ ID NO: 6587 - RNA, 20 nt, synthetic construct
  source 1..20: mol_type = other RNA
ccacagcccagtttggagta

SEQ ID NO: 6588 - RNA, 20 nt, synthetic construct
  source 1..20: mol_type = other RNA
cacagcccagtttggagtag

SEQ ID NO: 6589 - RNA, 20 nt, synthetic construct
  source 1..20: mol_type = other RNA
ttgattccagaaatgcactt

SEQ ID NO: 6590 - RNA, 20 nt, synthetic construct
  source 1..20: mol_type = other RNA
attgattccagaaatgcact

SEQ ID NO: 6591 - RNA, 20 nt, synthetic construct
  source 1..20: mol_type = other RNA
gggtgacccaagtgcatttc

SEQ ID NO: 6592 - RNA, 20 nt, synthetic construct
  source 1..20: mol_type = other RNA
gcatttctggaatcaatacc

SEQ ID NO: 6593 - RNA, 20 nt, synthetic construct
  source 1..20: mol_type = other RNA
agagtggtgtgagaataacc

SEQ ID NO: 6594 - RNA, 20 nt, synthetic construct
  source 1..20: mol_type = other RNA
cctacattgggggtggagag

SEQ ID NO: 6595 - RNA, 20 nt, synthetic construct
  source 1..20: mol_type = other RNA
cacctcacctacattggggg

SEQ ID NO: 6596 - RNA, 20 nt, synthetic construct
  source 1..20: mol_type = other RNA
gggcacctcacctacattgg

SEQ ID NO: 6597 - RNA, 20 nt, synthetic construct
  source 1..20: mol_type = other RNA
ccactctccacccccaatgt

SEQ ID NO: 6598 - RNA, 20 nt, synthetic construct
  source 1..20: mol_type = other RNA
ggggcacctcacctacattg

SEQ ID NO: 6599 - RNA, 20 nt, synthetic construct
  source 1..20: mol_type = other RNA
tggggcacctcacctacatt

SEQ ID NO: 6600 - RNA, 20 nt, synthetic construct
  source 1..20: mol_type = other RNA
ctggggcacctcacctacat

SEQ ID NO: 6601 - RNA, 20 nt, synthetic construct
  source 1..20: mol_type = other RNA
ctccacccccaatgtaggtg

SEQ ID NO: 6602 - RNA, 20 nt, synthetic construct
  source 1..20: mol_type = other RNA
caatgtaggtgaggtgcccc

SEQ ID NO: 6603 - RNA, 20 nt, synthetic construct
  source 1..20: mol_type = other RNA
gggggtacttggctggcctg

SEQ ID NO: 6604 - RNA, 20 nt, synthetic construct
  source 1..20: mol_type = other RNA
agggggtacttggctggcct

SEQ ID NO: 6605 - RNA, 20 nt, synthetic construct
  source 1..20: mol_type = other RNA
gagggggtacttggctggcc

SEQ ID NO: 6606 - RNA, 20 nt, synthetic construct
  source 1..20: mol_type = other RNA
actgggagggggtacttggc

SEQ ID NO: 6607 - RNA, 20 nt, synthetic construct
  source 1..20: mol_type = other RNA
atccactgggagggggtact

SEQ ID NO: 6608 - RNA, 20 nt, synthetic construct
  source 1..20: mol_type = other RNA
acagtgaatccactgggagg

SEQ ID NO: 6609 - RNA, 20 nt, synthetic construct
  source 1..20: mol_type = other RNA
gacagtgaatccactgggag

SEQ ID NO: 6610 - RNA, 20 nt, synthetic construct
  source 1..20: mol_type = other RNA
agccaagtaccccctcccag

SEQ ID NO: 6611 - RNA, 20 nt, synthetic construct
  source 1..20: mol_type = other RNA
ggacagtgaatccactggga

SEQ ID NO: 6612 - RNA, 20 nt, synthetic construct
  source 1..20: mol_type = other RNA
tggacagtgaatccactggg

SEQ ID NO: 6613 - RNA, 20 nt, synthetic construct
  source 1..20: mol_type = other RNA
ccgtggacagtgaatccact

SEQ ID NO: 6614 - RNA, 20 nt, synthetic construct
  source 1..20: mol_type = other RNA
gccgtggacagtgaatccac

SEQ ID NO: 6615 - RNA, 20 nt, synthetic construct
  source 1..20: mol_type = other RNA
cccagtggattcactgtcca

SEQ ID NO: 6616 - RNA, 20 nt, synthetic construct
  source 1..20: mol_type = other RNA
ctggagatgttgggaggccg

SEQ ID NO: 6617 - RNA, 20 nt, synthetic construct
  source 1..20: mol_type = other RNA
gccggtctggagatgttggg

SEQ ID NO: 6618 - RNA, 20 nt, synthetic construct
  source 1..20: mol_type = other RNA
ctggccggtctggagatgtt

SEQ ID NO: 6619 - RNA, 20 nt, synthetic construct
  source 1..20: mol_type = other RNA
cctggccggtctggagatgt

SEQ ID NO: 6620 - RNA, 20 nt, synthetic construct
  source 1..20: mol_type = other RNA
gcctcccaacatctccagac

SEQ ID NO: 6621 - RNA, 20 nt, synthetic construct
  source 1..20: mol_type = other RNA
ctggtggagcctggccggtc

SEQ ID NO: 6622 - RNA, 20 nt, synthetic construct
  source 1..20: mol_type = other RNA
ccaacatctccagaccggcc

SEQ ID NO: 6623 - RNA, 20 nt, synthetic construct
  source 1..20: mol_type = other RNA
aggggctggtggagcctggc

SEQ ID NO: 6624 - RNA, 20 nt, synthetic construct
  source 1..20: mol_type = other RNA
gcgaaggggctggtggagcc

SEQ ID NO: 6625 - RNA, 20 nt, synthetic construct
  source 1..20: mol_type = other RNA
tgatggagcgaaggggctgg

SEQ ID NO: 6626 - RNA, 20 nt, synthetic construct
  source 1..20: mol_type = other RNA
ggctgatggagcgaaggggc

SEQ ID NO: 6627 - RNA, 20 nt, synthetic construct
  source 1..20: mol_type = other RNA
cagtggctgatggagcgaag

SEQ ID NO: 6628 - RNA, 20 nt, synthetic construct
  source 1..20: mol_type = other RNA
tcagtggctgatggagcgaa

SEQ ID NO: 6629 - RNA, 20 nt, synthetic construct
  source 1..20: mol_type = other RNA
gtcagtggctgatggagcga

SEQ ID NO: 6630 - RNA, 20 nt, synthetic construct
  source 1..20: mol_type = other RNA
ctgggcaggtcagtggctga

SEQ ID NO: 6631 - RNA, 20 nt, synthetic construct
  source 1..20: mol_type = other RNA
aggcatgctgggcaggtcag

SEQ ID NO: 6632 - RNA, 20 nt, synthetic construct
  source 1..20: mol_type = other RNA
caggttcaggcatgctgggc

SEQ ID NO: 6633 - RNA, 20 nt, synthetic construct
  source 1..20: mol_type = other RNA
agggcaggttcaggcatgct

SEQ ID NO: 6634 - RNA, 20 nt, synthetic construct
  source 1..20: mol_type = other RNA
cagggcaggttcaggcatgc

SEQ ID NO: 6635 - RNA, 20 nt, synthetic construct
  source 1..20: mol_type = other RNA
cgggaggtcagggcaggttc

SEQ ID NO: 6636 - RNA, 20 nt, synthetic construct
  source 1..20: mol_type = other RNA
tttgctcgggaggtcagggc

SEQ ID NO: 6637 - RNA, 20 nt, synthetic construct
  source 1..20: mol_type = other RNA
catgtttgctcgggaggtca

SEQ ID NO: 6638 - RNA, 20 nt, synthetic construct
  source 1..20: mol_type = other RNA
tcatgtttgctcgggaggtc

SEQ ID NO: 6639 - RNA, 20 nt, synthetic construct
  source 1..20: mol_type = other RNA
acctgtcatgtttgctcggg

SEQ ID NO: 6640 - RNA, 20 nt, synthetic construct
  source 1..20: mol_type = other RNA
cttacctgtcatgtttgctc

SEQ ID NO: 6641 - RNA, 20 nt, synthetic construct
  source 1..20: mol_type = other RNA
ccttacctgtcatgtttgct

SEQ ID NO: 6642 - RNA, 20 nt, synthetic construct
  source 1..20: mol_type = other RNA
acctcccgagcaaacatgac

SEQ ID NO: 6643 - RNA, 20 nt, synthetic construct
  source 1..20: mol_type = other RNA
ccgagcaaacatgacaggta

SEQ ID NO: 6644 - RNA, 20 nt, synthetic construct
  source 1..20: mol_type = other RNA
catgacaggtaaggaccctt

SEQ ID NO: 6645 - RNA, 20 nt, synthetic construct
  source 1..20: mol_type = other RNA
atgacaggtaaggaccctta

SEQ ID NO: 6646 - RNA, 20 nt, synthetic construct
  source 1..20: mol_type = other RNA
gtacctctcacaggccctaa

SEQ ID NO: 6647 - RNA, 20 nt, synthetic construct
  source 1..20: mol_type = other RNA
agtacctctcacaggcccta

SEQ ID NO: 6648 - RNA, 20 nt, synthetic construct
  source 1..20: mol_type = other RNA
ggacccttagggcctgtgag

SEQ ID NO: 6649 - RNA, 20 nt, synthetic construct
  source 1..20: mol_type = other RNA
ctgcttctagtacctctcac

SEQ ID NO: 6650 - RNA, 20 nt, synthetic construct
  source 1..20: mol_type = other RNA
ctgtgagaggtactagaagc

SEQ ID NO: 6651 - RNA, 20 nt, synthetic construct
  source 1..20: mol_type = other RNA
aggtactagaagcaggatcg

SEQ ID NO: 6652 - RNA, 20 nt, synthetic construct
  source 1..20: mol_type = other RNA
tagaagcaggatcgaggccc

SEQ ID NO: 6653 - RNA, 20 nt, synthetic construct
  source 1..20: mol_type = other RNA
agaagcaggatcgaggccct

SEQ ID NO: 6654 - RNA, 20 nt, synthetic construct
  source 1..20: mol_type = other RNA
gaagcaggatcgaggccctg

SEQ ID NO: 6655 - RNA, 20 nt, synthetic construct
  source 1..20: mol_type = other RNA
caggatcgaggccctgggga

SEQ ID NO: 6656 - RNA, 20 nt, synthetic construct
  source 1..20: mol_type = other RNA
ttgagacaattccttcccca

SEQ ID NO: 6657 - RNA, 20 nt, synthetic construct
  source 1..20: mol_type = other RNA
tttgagacaattccttcccc

SEQ ID NO: 6658 - RNA, 20 nt, synthetic construct
  source 1..20: mol_type = other RNA
cctacaggcagctttgcttg

SEQ ID NO: 6659 - RNA, 20 nt, synthetic construct
  source 1..20: mol_type = other RNA
ccacaagcaaagctgcctgt

SEQ ID NO: 6660 - RNA, 20 nt, synthetic construct
  source 1..20: mol_type = other RNA
cacaagcaaagctgcctgta

SEQ ID NO: 6661 - RNA, 20 nt, synthetic construct
  source 1..20: mol_type = other RNA
acatgacctgttgtccctac

SEQ ID NO: 6662 - RNA, 20 nt, synthetic construct
  source 1..20: mol_type = other RNA
aagctgcctgtagggacaac

SEQ ID NO: 6663 - RNA, 20 nt, synthetic construct
  source 1..20: mol_type = other RNA
agggacaacaggtcatgttt

SEQ ID NO: 6664 - RNA, 20 nt, synthetic construct
  source 1..20: mol_type = other RNA
gggacaacaggtcatgttta

SEQ ID NO: 6665 - RNA, 20 nt, synthetic construct
  source 1..20: mol_type = other RNA
ggacaacaggtcatgtttag

SEQ ID NO: 6666 - RNA, 20 nt, synthetic construct
  source 1..20: mol_type = other RNA
ggtcatgtttaggggtcagt

SEQ ID NO: 6667 - RNA, 20 nt, synthetic construct
  source 1..20: mol_type = other RNA
gtcatgtttaggggtcagtc

SEQ ID NO: 6668 - RNA, 20 nt, synthetic construct
  source 1..20: mol_type = other RNA
gtttaggggtcagtcgggac

SEQ ID NO: 6669 - RNA, 20 nt, synthetic construct
  source 1..20: mol_type = other RNA
tttaggggtcagtcgggaca

SEQ ID NO: 6670 - RNA, 20 nt, synthetic construct
  source 1..20: mol_type = other RNA
aggggtcagtcgggacaggg

SEQ ID NO: 6671 - RNA, 20 nt, synthetic construct
  source 1..20: mol_type = other RNA
ggggtcagtcgggacaggga

SEQ ID NO: 6672 - RNA, 20 nt, synthetic construct
  source 1..20: mol_type = other RNA
tcgggacagggagggtctcc

SEQ ID NO: 6673 - RNA, 20 nt, synthetic construct
  source 1..20: mol_type = other RNA
cgggacagggagggtctcca

SEQ ID NO: 6674 - RNA, 20 nt, synthetic construct
  source 1..20: mol_type = other RNA
cagggagggtctccagggag

SEQ ID NO: 6675 - RNA, 20 nt, synthetic construct
  source 1..20: mol_type = other RNA
acaaccatgcctccactccc

SEQ ID NO: 6676 - RNA, 20 nt, synthetic construct
  source 1..20: mol_type = other RNA
ggagggtctccagggagtgg

SEQ ID NO: 6677 - RNA, 20 nt, synthetic construct
  source 1..20: mol_type = other RNA
gtctccagggagtggaggca

SEQ ID NO: 6678 - RNA, 20 nt, synthetic construct
  source 1..20: mol_type = other RNA
agggagtggaggcatggttg

SEQ ID NO: 6679 - RNA, 20 nt, synthetic construct
  source 1..20: mol_type = other RNA
gggagtggaggcatggttgt

SEQ ID NO: 6680 - RNA, 20 nt, synthetic construct
  source 1..20: mol_type = other RNA
ggagtggaggcatggttgtg

SEQ ID NO: 6681 - RNA, 20 nt, synthetic construct
  source 1..20: mol_type = other RNA
gagtggaggcatggttgtgg

SEQ ID NO: 6682 - RNA, 20 nt, synthetic construct
  source 1..20: mol_type = other RNA
gaggcatggttgtgggggaa

SEQ ID NO: 6683 - RNA, 20 nt, synthetic construct
  source 1..20: mol_type = other RNA
ggctgtatttggatgggatg

SEQ ID NO: 6684 - RNA, 20 nt, synthetic construct
  source 1..20: mol_type = other RNA
gctgatggctgtatttggat

SEQ ID NO: 6685 - RNA, 20 nt, synthetic construct
  source 1..20: mol_type = other RNA
ggctgatggctgtatttgga

SEQ ID NO: 6686 - RNA, 20 nt, synthetic construct
  source 1..20: mol_type = other RNA
tgaaggctgatggctgtatt

SEQ ID NO: 6687 - RNA, 20 nt, synthetic construct
  source 1..20: mol_type = other RNA
aacaagcagctgaaggctga

SEQ ID NO: 6688 - RNA, 20 nt, synthetic construct
  source 1..20: mol_type = other RNA
gctgggtaacaagcagctga

SEQ ID NO: 6689 - RNA, 20 nt, synthetic construct
  source 1..20: mol_type = other RNA
cattgtctggcttttctgct

SEQ ID NO: 6690 - RNA, 20 nt, synthetic construct
  source 1..20: mol_type = other RNA
acattgtctggcttttctgc

SEQ ID NO: 6691 - RNA, 20 nt, synthetic construct
  source 1..20: mol_type = other RNA
aaagatctgaccacattgtc

SEQ ID NO: 6692 - RNA, 20 nt, synthetic construct
  source 1..20: mol_type = other RNA
agcagaaaagccagacaatg

SEQ ID NO: 6693 - RNA, 20 nt, synthetic construct
  source 1..20: mol_type = other RNA
caatatctatgtaaaaatca

SEQ ID NO: 6694 - RNA, 20 nt, synthetic construct
  source 1..20: mol_type = other RNA
acaatatctatgtaaaaatc

SEQ ID NO: 6695 - RNA, 20 nt, synthetic construct
  source 1..20: mol_type = other RNA
ttatttatttattgttgaga

SEQ ID NO: 6696 - RNA, 20 nt, synthetic construct
  source 1..20: mol_type = other RNA
ggagtctcactctgttgccc

SEQ ID NO: 6697 - RNA, 20 nt, synthetic construct
  source 1..20: mol_type = other RNA
gcaccactgcactctagcct

SEQ ID NO: 6698 - RNA, 20 nt, synthetic construct
  source 1..20: mol_type = other RNA
cgcaccactgcactctagcc

SEQ ID NO: 6699 - RNA, 20 nt, synthetic construct
  source 1..20: mol_type = other RNA
ttgcccaggctagagtgcag

SEQ ID NO: 6700 - RNA, 20 nt, synthetic construct
  source 1..20: mol_type = other RNA
cacttgaacctgtagggcgg

SEQ ID NO: 6701 - RNA, 20 nt, synthetic construct
  source 1..20: mol_type = other RNA
cactgcaacctccgccctac

SEQ ID NO: 6702 - RNA, 20 nt, synthetic construct
  source 1..20: mol_type = other RNA
aatcacttgaacctgtaggg

SEQ ID NO: 6703 - RNA, 20 nt, synthetic construct
  source 1..20: mol_type = other RNA
gagaatcacttgaacctgta

SEQ ID NO: 6704 - RNA, 20 nt, synthetic construct
  source 1..20: mol_type = other RNA
ggagaatcacttgaacctgt

SEQ ID NO: 6705 - RNA, 20 nt, synthetic construct
  source 1..20: mol_type = other RNA
gctgctccggaggctgaggc

SEQ ID NO: 6706 - RNA, 20 nt, synthetic construct
  source 1..20: mol_type = other RNA
tccagctgctccggaggctg

SEQ ID NO: 6707 - RNA, 20 nt, synthetic construct
  source 1..20: mol_type = other RNA
gattctcctgcctcagcctc

SEQ ID NO: 6708 - RNA, 20 nt, synthetic construct
  source 1..20: mol_type = other RNA
tgtaattccagctgctccgg

SEQ ID NO: 6709 - RNA, 20 nt, synthetic construct
  source 1..20: mol_type = other RNA
acctgtaattccagctgctc

SEQ ID NO: 6710 - RNA, 20 nt, synthetic construct
  source 1..20: mol_type = other RNA
gcctcagcctccggagcagc

SEQ ID NO: 6711 - RNA, 20 nt, synthetic construct
  source 1..20: mol_type = other RNA
tccggagcagctggaattac

SEQ ID NO: 6712 - RNA, 20 nt, synthetic construct
  source 1..20: mol_type = other RNA
caaaaattggctgggtgtga

SEQ ID NO: 6713 - RNA, 20 nt, synthetic construct
  source 1..20: mol_type = other RNA
tgaaattacaaaaattggct

SEQ ID NO: 6714 - RNA, 20 nt, synthetic construct
  source 1..20: mol_type = other RNA
ctgaaattacaaaaattggc

SEQ ID NO: 6715 - RNA, 20 nt, synthetic construct
  source 1..20: mol_type = other RNA
tctactgaaattacaaaaat

SEQ ID NO: 6716 - RNA, 20 nt, synthetic construct
  source 1..20: mol_type = other RNA
agagacaagtttaaccatgt

SEQ ID NO: 6717 - RNA, 20 nt, synthetic construct
  source 1..20: mol_type = other RNA
cgagaccagcctggccaaca

SEQ ID NO: 6718 - RNA, 20 nt, synthetic construct
  source 1..20: mol_type = other RNA
caagtttaaccatgttggcc

SEQ ID NO: 6719 - RNA, 20 nt, synthetic construct
  source 1..20: mol_type = other RNA
tttaaccatgttggccaggc

SEQ ID NO: 6720 - RNA, 20 nt, synthetic construct
  source 1..20: mol_type = other RNA
tcaggagttcgagaccagcc

SEQ ID NO: 6721 - RNA, 20 nt, synthetic construct
  source 1..20: mol_type = other RNA
caggtggatcacttgagatc

SEQ ID NO: 6722 - RNA, 20 nt, synthetic construct
  source 1..20: mol_type = other RNA
ctttgggaggtcgaggcagg

SEQ ID NO: 6723 - RNA, 20 nt, synthetic construct
  source 1..20: mol_type = other RNA
gcactttgggaggtcgaggc

SEQ ID NO: 6724 - RNA, 20 nt, synthetic construct
  source 1..20: mol_type = other RNA
cccagcactttgggaggtcg

SEQ ID NO: 6725 - RNA, 20 nt, synthetic construct
  source 1..20: mol_type = other RNA
tgtaatcccagcactttggg

SEQ ID NO: 6726 - RNA, 20 nt, synthetic construct
  source 1..20: mol_type = other RNA
acctgtaatcccagcacttt

SEQ ID NO: 6727 - RNA, 20 nt, synthetic construct
  source 1..20: mol_type = other RNA
gcctcgacctcccaaagtgc

SEQ ID NO: 6728 - RNA, 20 nt, synthetic construct
  source 1..20: mol_type = other RNA
cacctgtaatcccagcactt

SEQ ID NO: 6729 - RNA, 20 nt, synthetic construct
  source 1..20: mol_type = other RNA
cctcgacctcccaaagtgct

SEQ ID NO: 6730 - RNA, 20 nt, synthetic construct
  source 1..20: mol_type = other RNA
tcccaaagtgctgggattac

SEQ ID NO: 6731 - RNA, 20 nt, synthetic construct
  source 1..20: mol_type = other RNA
caatatcaggctgggtgcag

SEQ ID NO: 6732 - RNA, 20 nt, synthetic construct
  source 1..20: mol_type = other RNA
gaaaatcgcaatatcaggct

SEQ ID NO: 6733 - RNA, 20 nt, synthetic construct
  source 1..20: mol_type = other RNA
agaaaatcgcaatatcaggc

SEQ ID NO: 6734 - RNA, 20 nt, synthetic construct
  source 1..20: mol_type = other RNA
aaaaagaaaatcgcaatatc

SEQ ID NO: 6735 - RNA, 20 nt, synthetic construct
  source 1..20: mol_type = other RNA
gaaatttttaaaagtacagt

SEQ ID NO: 6736 - RNA, 20 nt, synthetic construct
  source 1..20: mol_type = other RNA
aactcaaatatgtctttctt

SEQ ID NO: 6737 - RNA, 20 nt, synthetic construct
  source 1..20: mol_type = other RNA
tttgagttagatacagcctc

SEQ ID NO: 6738 - RNA, 20 nt, synthetic construct
  source 1..20: mol_type = other RNA
ggttataagatagcggcctg

SEQ ID NO: 6739 - RNA, 20 nt, synthetic construct
  source 1..20: mol_type = other RNA
agatggaggttataagatag

SEQ ID NO: 6740 - RNA, 20 nt, synthetic construct
  source 1..20: mol_type = other RNA
ctatcttataacctccatct

SEQ ID NO: 6741 - RNA, 20 nt, synthetic construct
  source 1..20: mol_type = other RNA
ggctgagtttcccaagatgg

SEQ ID NO: 6742 - RNA, 20 nt, synthetic construct
  source 1..20: mol_type = other RNA
tatcttataacctccatctt

SEQ ID NO: 6743 - RNA, 20 nt, synthetic construct
  source 1..20: mol_type = other RNA
atgggctgagtttcccaaga

SEQ ID NO: 6744 - RNA, 20 nt, synthetic construct
  source 1..20: mol_type = other RNA
ttgggaaactcagcccatga

SEQ ID NO: 6745 - RNA, 20 nt, synthetic construct
  source 1..20: mol_type = other RNA
ttagtccttacagccttcat

SEQ ID NO: 6746 - RNA, 20 nt, synthetic construct
  source 1..20: mol_type = other RNA
cttagtccttacagccttca

SEQ ID NO: 6747 - RNA, 20 nt, synthetic construct
  source 1..20: mol_type = other RNA
ctcagcccatgaaggctgta

SEQ ID NO: 6748 - RNA, 20 nt, synthetic construct
  source 1..20: mol_type = other RNA
tgaaggctgtaaggactaag

SEQ ID NO: 6749 - RNA, 20 nt, synthetic construct
  source 1..20: mol_type = other RNA
gtaaggactaagtggcccag

SEQ ID NO: 6750 - RNA, 20 nt, synthetic construct
  source 1..20: mol_type = other RNA
taaggactaagtggcccaga

SEQ ID NO: 6751 - RNA, 20 nt, synthetic construct
  source 1..20: mol_type = other RNA
ggactaagtggcccagaggg

SEQ ID NO: 6752 - RNA, 20 nt, synthetic construct
  source 1..20: mol_type = other RNA
ctggggacccccctccctct

SEQ ID NO: 6753 - RNA, 20 nt, synthetic construct
  source 1..20: mol_type = other RNA
gactaagtggcccagaggga

SEQ ID NO: 6754 - RNA, 20 nt, synthetic construct
  source 1..20: mol_type = other RNA
cctggggacccccctccctc

SEQ ID NO: 6755 - RNA, 20 nt, synthetic construct
  source 1..20: mol_type = other RNA
actaagtggcccagagggag

SEQ ID NO: 6756 - RNA, 20 nt, synthetic construct
  source 1..20: mol_type = other RNA
ctaagtggcccagagggagg

SEQ ID NO: 6757 - RNA, 20 nt, synthetic construct
  source 1..20: mol_type = other RNA
taagtggcccagagggaggg

SEQ ID NO: 6758 - RNA, 20 nt, synthetic construct
  source 1..20: mol_type = other RNA
ccagagggaggggggtcccc

SEQ ID NO: 6759 - RNA, 20 nt, synthetic construct
  source 1..20: mol_type = other RNA
cagagggaggggggtcccca

SEQ ID NO: 6760 - RNA, 20 nt, synthetic construct
  source 1..20: mol_type = other RNA
agagggaggggggtccccag

SEQ ID NO: 6761 - RNA, 20 nt, synthetic construct
  source 1..20: mol_type = other RNA
tagggtgagggttacccctg

SEQ ID NO: 6762 - RNA, 20 nt, synthetic construct
  source 1..20: mol_type = other RNA
ttagggtgagggttacccct

SEQ ID NO: 6763 - RNA, 20 nt, synthetic construct
  source 1..20: mol_type = other RNA
tttagggtgagggttacccc

SEQ ID NO: 6764 - RNA, 20 nt, synthetic construct
  source 1..20: mol_type = other RNA
aggtgccagatttagggtga

SEQ ID NO: 6765 - RNA, 20 nt, synthetic construct
  source 1..20: mol_type = other RNA
caggtgccagatttagggtg

SEQ ID NO: 6766 - RNA, 20 nt, synthetic construct
  source 1..20: mol_type = other RNA
ggtaaccctcaccctaaatc

SEQ ID NO: 6767 - RNA, 20 nt, synthetic construct
  source 1..20: mol_type = other RNA
agaagcaggtgccagattta

SEQ ID NO: 6768 - RNA, 20 nt, synthetic construct
  source 1..20: mol_type = other RNA
gagaagcaggtgccagattt

SEQ ID NO: 6769 - RNA, 20 nt, synthetic construct
  source 1..20: mol_type = other RNA
tgctctggagatggagaagc

SEQ ID NO: 6770 - RNA, 20 nt, synthetic construct
  source 1..20: mol_type = other RNA
gacgtcttgtgctctggaga

SEQ ID NO: 6771 - RNA, 20 nt, synthetic construct
  source 1..20: mol_type = other RNA
gtgggggacgtcttgtgctc

SEQ ID NO: 6772 - RNA, 20 nt, synthetic construct
  source 1..20: mol_type = other RNA
agctgccgggcattgggtgg

SEQ ID NO: 6773 - RNA, 20 nt, synthetic construct
  source 1..20: mol_type = other RNA
cagctgccgggcattgggtg

SEQ ID NO: 6774 - RNA, 20 nt, synthetic construct
  source 1..20: mol_type = other RNA
ccagctgccgggcattgggt

SEQ ID NO: 6775 - RNA, 20 nt, synthetic construct
  source 1..20: mol_type = other RNA
tccagctgccgggcattggg

SEQ ID NO: 6776 - RNA, 20 nt, synthetic construct
  source 1..20: mol_type = other RNA
gacgtcccccacccaatgcc

SEQ ID NO: 6777 - RNA, 20 nt, synthetic construct
  source 1..20: mol_type = other RNA
ctctccagctgccgggcatt

SEQ ID NO: 6778 - RNA, 20 nt, synthetic construct
  source 1..20: mol_type = other RNA
cctctccagctgccgggcat

SEQ ID NO: 6779 - RNA, 20 nt, synthetic construct
  source 1..20: mol_type = other RNA
cccacccaatgcccggcagc

SEQ ID NO: 6780 - RNA, 20 nt, synthetic construct
  source 1..20: mol_type = other RNA
tggagacctctccagctgcc

SEQ ID NO: 6781 - RNA, 20 nt, synthetic construct
  source 1..20: mol_type = other RNA
ttggagacctctccagctgc

SEQ ID NO: 6782 - RNA, 20 nt, synthetic construct
  source 1..20: mol_type = other RNA
ccaatgcccggcagctggag

SEQ ID NO: 6783 - RNA, 20 nt, synthetic construct
  source 1..20: mol_type = other RNA
aggccattttggaagcttgt

SEQ ID NO: 6784 - RNA, 20 nt, synthetic construct
  source 1..20: mol_type = other RNA
tctccaacaagcttccaaaa

SEQ ID NO: 6785 - RNA, 20 nt, synthetic construct
  source 1..20: mol_type = other RNA
catcactcaccaggccattt

SEQ ID NO: 6786 - RNA, 20 nt, synthetic construct
  source 1..20: mol_type = other RNA
aacaagcttccaaaatggcc

SEQ ID NO: 6787 - RNA, 20 nt, synthetic construct
  source 1..20: mol_type = other RNA
gagatcccgcatcactcacc

SEQ ID NO: 6788 - RNA, 20 nt, synthetic construct
  source 1..20: mol_type = other RNA
aaatggcctggtgagtgatg

SEQ ID NO: 6789 - RNA, 20 nt, synthetic construct
  source 1..20: mol_type = other RNA
aatggcctggtgagtgatgc

SEQ ID NO: 6790 - RNA, 20 nt, synthetic construct
  source 1..20: mol_type = other RNA
gatgcgggatctctctgccc

SEQ ID NO: 6791 - RNA, 20 nt, synthetic construct
  source 1..20: mol_type = other RNA
atgcgggatctctctgccct

SEQ ID NO: 6792 - RNA, 20 nt, synthetic construct
  source 1..20: mol_type = other RNA
cgggatctctctgccctggg

SEQ ID NO: 6793 - RNA, 20 nt, synthetic construct
  source 1..20: mol_type = other RNA
gcttccatctccaccaccca

SEQ ID NO: 6794 - RNA, 20 nt, synthetic construct
  source 1..20: mol_type = other RNA
gatctctctgccctgggtgg

SEQ ID NO: 6795 - RNA, 20 nt, synthetic construct
  source 1..20: mol_type = other RNA
ggcttccatctccaccaccc

SEQ ID NO: 6796 - RNA, 20 nt, synthetic construct
  source 1..20: mol_type = other RNA
tctgccctgggtggtggaga

SEQ ID NO: 6797 - RNA, 20 nt, synthetic construct
  source 1..20: mol_type = other RNA
tggagatggaagcccatatc

SEQ ID NO: 6798 - RNA, 20 nt, synthetic construct
  source 1..20: mol_type = other RNA
agcaatgtgaagccagatat

SEQ ID NO: 6799 - RNA, 20 nt, synthetic construct
  source 1..20: mol_type = other RNA
gagcaatgtgaagccagata

SEQ ID NO: 6800 - RNA, 20 nt, synthetic construct
  source 1..20: mol_type = other RNA
tgtgtgagccaacaaagaag

SEQ ID NO: 6801 - RNA, 20 nt, synthetic construct
  source 1..20: mol_type = other RNA
gtgtgtgagccaacaaagaa

SEQ ID NO: 6802 - RNA, 20 nt, synthetic construct
  source 1..20: mol_type = other RNA
agtgtgtgagccaacaaaga

SEQ ID NO: 6803 - RNA, 20 nt, synthetic construct
  source 1..20: mol_type = other RNA
ttattcaaccccttctttgt

SEQ ID NO: 6804 - RNA, 20 nt, synthetic construct
  source 1..20: mol_type = other RNA
tggagtgaatggtgaaatga

SEQ ID NO: 6805 - RNA, 20 nt, synthetic construct
  source 1..20: mol_type = other RNA
tgagggagtggtggagtgaa

SEQ ID NO: 6806 - RNA, 20 nt, synthetic construct
  source 1..20: mol_type = other RNA
aatattatttgagggagtgg

SEQ ID NO: 6807 - RNA, 20 nt, synthetic construct
  source 1..20: mol_type = other RNA
ataaatattatttgagggag

SEQ ID NO: 6808 - RNA, 20 nt, synthetic construct
  source 1..20: mol_type = other RNA
gggcaataaatattatttga

SEQ ID NO: 6809 - RNA, 20 nt, synthetic construct
  source 1..20: mol_type = other RNA
agggcaataaatattatttg

SEQ ID NO: 6810 - RNA, 20 nt, synthetic construct
  source 1..20: mol_type = other RNA
cccagtgcaggcttattgaa

SEQ ID NO: 6811 - RNA, 20 nt, synthetic construct
  source 1..20: mol_type = other RNA
acccagtgcaggcttattga

SEQ ID NO: 6812 - RNA, 20 nt, synthetic construct
  source 1..20: mol_type = other RNA
gcccttcaataagcctgcac

SEQ ID NO: 6813 - RNA, 20 nt, synthetic construct
  source 1..20: mol_type = other RNA
cccttcaataagcctgcact

SEQ ID NO: 6814 - RNA, 20 nt, synthetic construct
  source 1..20: mol_type = other RNA
gaagtgttaacacccagtgc

SEQ ID NO: 6815 - RNA, 20 nt, synthetic construct
  source 1..20: mol_type = other RNA
ggtgttaacacttcattgtc

SEQ ID NO: 6816 - RNA, 20 nt, synthetic construct
  source 1..20: mol_type = other RNA
tcaggctgagagaatgaatg

SEQ ID NO: 6817 - RNA, 20 nt, synthetic construct
  source 1..20: mol_type = other RNA
caggctgagagaatgaatga

SEQ ID NO: 6818 - RNA, 20 nt, synthetic construct
  source 1..20: mol_type = other RNA
aggctgagagaatgaatgag

SEQ ID NO: 6819 - RNA, 20 nt, synthetic construct
  source 1..20: mol_type = other RNA
cgaatgatgaagtgagtgag

SEQ ID NO: 6820 - RNA, 20 nt, synthetic construct
  source 1..20: mol_type = other RNA
gatgaagtgagaagttgatg

SEQ ID NO: 6821 - RNA, 20 nt, synthetic construct
  source 1..20: mol_type = other RNA
aagtgagaagttgatgagga

SEQ ID NO: 6822 - RNA, 20 nt, synthetic construct
  source 1..20: mol_type = other RNA
agtgagaagttgatgaggat

SEQ ID NO: 6823 - RNA, 20 nt, synthetic construct
  source 1..20: mol_type = other RNA
gttgatgaggatgggagcaa

SEQ ID NO: 6824 - RNA, 20 nt, synthetic construct
  source 1..20: mol_type = other RNA
aggatgggagcaatggaaag

SEQ ID NO: 6825 - RNA, 20 nt, synthetic construct
  source 1..20: mol_type = other RNA
ggatgggagcaatggaaagt

SEQ ID NO: 6826 - RNA, 20 nt, synthetic construct
  source 1..20: mol_type = other RNA
ttagtaattctcttattcac

SEQ ID NO: 6827 - RNA, 20 nt, synthetic construct
  source 1..20: mol_type = other RNA
aaatgcttactctcacatac

SEQ ID NO: 6828 - RNA, 20 nt, synthetic construct
  source 1..20: mol_type = other RNA
catactggtctaagcatgtt

SEQ ID NO: 6829 - RNA, 20 nt, synthetic construct
  source 1..20: mol_type = other RNA
tggaaaatggggataatatt

SEQ ID NO: 6830 - RNA, 20 nt, synthetic construct
  source 1..20: mol_type = other RNA
ctggaaaatggggataatat

SEQ ID NO: 6831 - RNA, 20 nt, synthetic construct
  source 1..20: mol_type = other RNA
gtagcctcatctggaaaatg

SEQ ID NO: 6832 - RNA, 20 nt, synthetic construct
  source 1..20: mol_type = other RNA
agtagcctcatctggaaaat

SEQ ID NO: 6833 - RNA, 20 nt, synthetic construct
  source 1..20: mol_type = other RNA
cagtagcctcatctggaaaa

SEQ ID NO: 6834 - RNA, 20 nt, synthetic construct
  source 1..20: mol_type = other RNA
ttatccccattttccagatg

SEQ ID NO: 6835 - RNA, 20 nt, synthetic construct
  source 1..20: mol_type = other RNA
catgcctcagtagcctcatc

SEQ ID NO: 6836 - RNA, 20 nt, synthetic construct
  source 1..20: mol_type = other RNA
ttttccagatgaggctactg

SEQ ID NO: 6837 - RNA, 20 nt, synthetic construct
  source 1..20: mol_type = other RNA
cagatgaggctactgaggca

SEQ ID NO: 6838 - RNA, 20 nt, synthetic construct
  source 1..20: mol_type = other RNA
atgaggctactgaggcatgg

SEQ ID NO: 6839 - RNA, 20 nt, synthetic construct
  source 1..20: mol_type = other RNA
tgaggctactgaggcatggt

SEQ ID NO: 6840 - RNA, 20 nt, synthetic construct
  source 1..20: mol_type = other RNA
ctcagaattgctccagcaag

SEQ ID NO: 6841 - RNA, 20 nt, synthetic construct
  source 1..20: mol_type = other RNA
atcccggttctaccacttgc

SEQ ID NO: 6842 - RNA, 20 nt, synthetic construct
  source 1..20: mol_type = other RNA
gctccagcaagtggtagaac

SEQ ID NO: 6843 - RNA, 20 nt, synthetic construct
  source 1..20: mol_type = other RNA
ctccagcaagtggtagaacc

SEQ ID NO: 6844 - RNA, 20 nt, synthetic construct
  source 1..20: mol_type = other RNA
acgtgtctgggttcaaatcc

SEQ ID NO: 6845 - RNA, 20 nt, synthetic construct
  source 1..20: mol_type = other RNA
acagtggagcccacgtgtct

SEQ ID NO: 6846 - RNA, 20 nt, synthetic construct
  source 1..20: mol_type = other RNA
gggatttgaacccagacacg

SEQ ID NO: 6847 - RNA, 20 nt, synthetic construct
  source 1..20: mol_type = other RNA
gacagtggagcccacgtgtc

SEQ ID NO: 6848 - RNA, 20 nt, synthetic construct
  source 1..20: mol_type = other RNA
ggatttgaacccagacacgt

SEQ ID NO: 6849 - RNA, 20 nt, synthetic construct
  source 1..20: mol_type = other RNA
agtgttaagagttaagacag

SEQ ID NO: 6850 - RNA, 20 nt, synthetic construct
  source 1..20: mol_type = other RNA
accatggggaggtcatggga

SEQ ID NO: 6851 - RNA, 20 nt, synthetic construct
  source 1..20: mol_type = other RNA
caccatggggaggtcatggg

SEQ ID NO: 6852 - RNA, 20 nt, synthetic construct
  source 1..20: mol_type = other RNA
actcaccatggggaggtcat

SEQ ID NO: 6853 - RNA, 20 nt, synthetic construct
  source 1..20: mol_type = other RNA
cactcaccatggggaggtca

SEQ ID NO: 6854 - RNA, 20 nt, synthetic construct
  source 1..20: mol_type = other RNA
tccctcccatgacctcccca

SEQ ID NO: 6855 - RNA, 20 nt, synthetic construct
  source 1..20: mol_type = other RNA
actactcactcaccatgggg

SEQ ID NO: 6856 - RNA, 20 nt, synthetic construct
  source 1..20: mol_type = other RNA
atcactactcactcaccatg

SEQ ID NO: 6857 - RNA, 20 nt, synthetic construct
  source 1..20: mol_type = other RNA
gatcactactcactcaccat

SEQ ID NO: 6858 - RNA, 20 nt, synthetic construct
  source 1..20: mol_type = other RNA
tgatcactactcactcacca

SEQ ID NO: 6859 - RNA, 20 nt, synthetic construct
  source 1..20: mol_type = other RNA
aaagcttagtgagtaaatga

SEQ ID NO: 6860 - RNA, 20 nt, synthetic construct
  source 1..20: mol_type = other RNA
aatgaaggaatgagaaaaga

SEQ ID NO: 6861 - RNA, 20 nt, synthetic construct
  source 1..20: mol_type = other RNA
tgagaaaagatggccatgca

SEQ ID NO: 6862 - RNA, 20 nt, synthetic construct
  source 1..20: mol_type = other RNA
caggcataaggcaccatgca

SEQ ID NO: 6863 - RNA, 20 nt, synthetic construct
  source 1..20: mol_type = other RNA
gtgctgggattacaggcata

SEQ ID NO: 6864 - RNA, 20 nt, synthetic construct
  source 1..20: mol_type = other RNA
tcccaaagtgctgggattac

SEQ ID NO: 6865 - RNA, 20 nt, synthetic construct
  source 1..20: mol_type = other RNA
ccttggcctcccaaagtgct

SEQ ID NO: 6866 - RNA, 20 nt, synthetic construct
  source 1..20: mol_type = other RNA
tgcctgtaatcccagcactt

SEQ ID NO: 6867 - RNA, 20 nt, synthetic construct
  source 1..20: mol_type = other RNA
gccttggcctcccaaagtgc

SEQ ID NO: 6868 - RNA, 20 nt, synthetic construct
  source 1..20: mol_type = other RNA
gcctgtaatcccagcacttt

SEQ ID NO: 6869 - RNA, 20 nt, synthetic construct
  source 1..20: mol_type = other RNA
tgtaatcccagcactttggg

SEQ ID NO: 6870 - RNA, 20 nt, synthetic construct
  source 1..20: mol_type = other RNA
cccagcactttgggaggcca

SEQ ID NO: 6871 - RNA, 20 nt, synthetic construct
  source 1..20: mol_type = other RNA
gcactttgggaggccaaggc

SEQ ID NO: 6872 - RNA, 20 nt, synthetic construct
  source 1..20: mol_type = other RNA
ctcaggtgatccacctgcct

SEQ ID NO: 6873 - RNA, 20 nt, synthetic construct
  source 1..20: mol_type = other RNA
ctttgggaggccaaggcagg

SEQ ID NO: 6874 - RNA, 20 nt, synthetic construct
  source 1..20: mol_type = other RNA
caaggcaggtggatcacctg

SEQ ID NO: 6875 - RNA, 20 nt, synthetic construct
  source 1..20: mol_type = other RNA
caggtggatcacctgaggtc

SEQ ID NO: 6876 - RNA, 20 nt, synthetic construct
  source 1..20: mol_type = other RNA
ggtctcgaactcctgacctc

SEQ ID NO: 6877 - RNA, 20 nt, synthetic construct
  source 1..20: mol_type = other RNA
tcaggagttcgagaccagcc

SEQ ID NO: 6878 - RNA, 20 nt, synthetic construct
  source 1..20: mol_type = other RNA
tttcactatgttggccaggc

SEQ ID NO: 6879 - RNA, 20 nt, synthetic construct
  source 1..20: mol_type = other RNA
ggggtttcactatgttggcc

SEQ ID NO: 6880 - RNA, 20 nt, synthetic construct
  source 1..20: mol_type = other RNA
gagacggggtttcactatgt

SEQ ID NO: 6881 - RNA, 20 nt, synthetic construct
  source 1..20: mol_type = other RNA
tgtattttttaatggagacg

SEQ ID NO: 6882 - RNA, 20 nt, synthetic construct
  source 1..20: mol_type = other RNA
ttgtattttttaatggagac

SEQ ID NO: 6883 - RNA, 20 nt, synthetic construct
  source 1..20: mol_type = other RNA
tttgtattttttaatggaga

SEQ ID NO: 6884 - RNA, 20 nt, synthetic construct
  source 1..20: mol_type = other RNA
ctaatttttgtattttttaa

SEQ ID NO: 6885 - RNA, 20 nt, synthetic construct
  source 1..20: mol_type = other RNA
atacaaaaattagccagacg

SEQ ID NO: 6886 - RNA, 20 nt, synthetic construct
  source 1..20: mol_type = other RNA
caggcacccactaccacgtc

SEQ ID NO: 6887 - RNA, 20 nt, synthetic construct
  source 1..20: mol_type = other RNA
aaattagccagacgtggtag

SEQ ID NO: 6888 - RNA, 20 nt, synthetic construct
  source 1..20: mol_type = other RNA
aattagccagacgtggtagt

SEQ ID NO: 6889 - RNA, 20 nt, synthetic construct
  source 1..20: mol_type = other RNA
tgccaagtagctgggattac

SEQ ID NO: 6890 - RNA, 20 nt, synthetic construct
  source 1..20: mol_type = other RNA
cctcggcctgccaagtagct

SEQ ID NO: 6891 - RNA, 20 nt, synthetic construct
  source 1..20: mol_type = other RNA
tgcctgtaatcccagctact

SEQ ID NO: 6892 - RNA, 20 nt, synthetic construct
  source 1..20: mol_type = other RNA
gcctcggcctgccaagtagc

SEQ ID NO: 6893 - RNA, 20 nt, synthetic construct
  source 1..20: mol_type = other RNA
tgtaatcccagctacttggc

SEQ ID NO: 6894 - RNA, 20 nt, synthetic construct
  source 1..20: mol_type = other RNA
cccagctacttggcaggccg

SEQ ID NO: 6895 - RNA, 20 nt, synthetic construct
  source 1..20: mol_type = other RNA
gctacttggcaggccgaggc

SEQ ID NO: 6896 - RNA, 20 nt, synthetic construct
  source 1..20: mol_type = other RNA
tttaggcgattctcctgcct

SEQ ID NO: 6897 - RNA, 20 nt, synthetic construct
  source 1..20: mol_type = other RNA
caggagaatcgcctaaaccc

SEQ ID NO: 6898 - RNA, 20 nt, synthetic construct
  source 1..20: mol_type = other RNA
aacctccacctcctgggttt

SEQ ID NO: 6899 - RNA, 20 nt, synthetic construct
  source 1..20: mol_type = other RNA
gagaatcgcctaaacccagg

SEQ ID NO: 6900 - RNA, 20 nt, synthetic construct
  source 1..20: mol_type = other RNA
aatcgcctaaacccaggagg

SEQ ID NO: 6901 - RNA, 20 nt, synthetic construct
  source 1..20: mol_type = other RNA
cacggcaacctccacctcct

SEQ ID NO: 6902 - RNA, 20 nt, synthetic construct
  source 1..20: mol_type = other RNA
tcacggcaacctccacctcc

SEQ ID NO: 6903 - RNA, 20 nt, synthetic construct
  source 1..20: mol_type = other RNA
cgcctaaacccaggaggtgg

SEQ ID NO: 6904 - RNA, 20 nt, synthetic construct
  source 1..20: mol_type = other RNA
actggcgcaatctcagctca

SEQ ID NO: 6905 - RNA, 20 nt, synthetic construct
  source 1..20: mol_type = other RNA
tgccccaggctggagtgcac

SEQ ID NO: 6906 - RNA, 20 nt, synthetic construct
  source 1..20: mol_type = other RNA
tgcgccagtgcactccagcc

SEQ ID NO: 6907 - RNA, 20 nt, synthetic construct
  source 1..20: mol_type = other RNA
gcgccagtgcactccagcct

SEQ ID NO: 6908 - RNA, 20 nt, synthetic construct
  source 1..20: mol_type = other RNA
cgccagtgcactccagcctg

SEQ ID NO: 6909 - RNA, 20 nt, synthetic construct
  source 1..20: mol_type = other RNA
tcctgccctgtgccccaggc

SEQ ID NO: 6910 - RNA, 20 nt, synthetic construct
  source 1..20: mol_type = other RNA
tggatcctgccctgtgcccc

SEQ ID NO: 6911 - RNA, 20 nt, synthetic construct
  source 1..20: mol_type = other RNA
tgcactccagcctggggcac

SEQ ID NO: 6912 - RNA, 20 nt, synthetic construct
  source 1..20: mol_type = other RNA
gcactccagcctggggcaca

SEQ ID NO: 6913 - RNA, 20 nt, synthetic construct
  source 1..20: mol_type = other RNA
tccagcctggggcacagggc

SEQ ID NO: 6914 - RNA, 20 nt, synthetic construct
  source 1..20: mol_type = other RNA
tctcttttttttttttgaga

SEQ ID NO: 6915 - RNA, 20 nt, synthetic construct
  source 1..20: mol_type = other RNA
aaagagagaaaaggtctaaa

SEQ ID NO: 6916 - RNA, 20 nt, synthetic construct
  source 1..20: mol_type = other RNA
gagaaaaggtctaaaaggag

SEQ ID NO: 6917 - RNA, 20 nt, synthetic construct
  source 1..20: mol_type = other RNA
acaagagagacgatgagtga

SEQ ID NO: 6918 - RNA, 20 nt, synthetic construct
  source 1..20: mol_type = other RNA
agagacgatgagtgaaggaa

SEQ ID NO: 6919 - RNA, 20 nt, synthetic construct
  source 1..20: mol_type = other RNA
gagacgatgagtgaaggaat

SEQ ID NO: 6920 - RNA, 20 nt, synthetic construct
  source 1..20: mol_type = other RNA
gatgagtgaaggaatgggtg

SEQ ID NO: 6921 - RNA, 20 nt, synthetic construct
  source 1..20: mol_type = other RNA
tgagtgaactaatgaatgag

SEQ ID NO: 6922 - RNA, 20 nt, synthetic construct
  source 1..20: mol_type = other RNA
gtgaactaatgaatgagtgg

SEQ ID NO: 6923 - RNA, 20 nt, synthetic construct
  source 1..20: mol_type = other RNA
tgaactaatgaatgagtggt

SEQ ID NO: 6924 - RNA, 20 nt, synthetic construct
  source 1..20: mol_type = other RNA
agcaaatgatgaagactgta

SEQ ID NO: 6925 - RNA, 20 nt, synthetic construct
  source 1..20: mol_type = other RNA
gcaaatgatgaagactgtat

SEQ ID NO: 6926 - RNA, 20 nt, synthetic construct
  source 1..20: mol_type = other RNA
caaatgatgaagactgtatg

SEQ ID NO: 6927 - RNA, 20 nt, synthetic construct
  source 1..20: mol_type = other RNA
aaatgatgaagactgtatgg

SEQ ID NO: 6928 - RNA, 20 nt, synthetic construct
  source 1..20: mol_type = other RNA
gactgtatgggggccagatg

SEQ ID NO: 6929 - RNA, 20 nt, synthetic construct
  source 1..20: mol_type = other RNA
caggtgtgagccaccacatc

SEQ ID NO: 6930 - RNA, 20 nt, synthetic construct
  source 1..20: mol_type = other RNA
tgtatgggggccagatgtgg

SEQ ID NO: 6931 - RNA, 20 nt, synthetic construct
  source 1..20: mol_type = other RNA
tcccaaagtgctgggattac

SEQ ID NO: 6932 - RNA, 20 nt, synthetic construct
  source 1..20: mol_type = other RNA
cacctgtaatcccagcactt

SEQ ID NO: 6933 - RNA, 20 nt, synthetic construct
  source 1..20: mol_type = other RNA
acctgtaatcccagcacttt

SEQ ID NO: 6934 - RNA, 20 nt, synthetic construct
  source 1..20: mol_type = other RNA
ctcaagcaatcgttccgcct

SEQ ID NO: 6935 - RNA, 20 nt, synthetic construct
  source 1..20: mol_type = other RNA
cggaacgattgcttgagccc

SEQ ID NO: 6936 - RNA, 20 nt, synthetic construct
  source 1..20: mol_type = other RNA
caggctggtcttgagctcct

SEQ ID NO: 6937 - RNA, 20 nt, synthetic construct
  source 1..20: mol_type = other RNA
ccaggctggtcttgagctcc

SEQ ID NO: 6938 - RNA, 20 nt, synthetic construct
  source 1..20: mol_type = other RNA
ccaggagctcaagaccagcc

SEQ ID NO: 6939 - RNA, 20 nt, synthetic construct
  source 1..20: mol_type = other RNA
caggagctcaagaccagcct

SEQ ID NO: 6940 - RNA, 20 nt, synthetic construct
  source 1..20: mol_type = other RNA
tctcactattttgcccaggc

SEQ ID NO: 6941 - RNA, 20 nt, synthetic construct
  source 1..20: mol_type = other RNA
aagttctcactattttgccc

SEQ ID NO: 6942 - RNA, 20 nt, synthetic construct
  source 1..20: mol_type = other RNA
acaaaaaagaaaaattagcc

SEQ ID NO: 6943 - RNA, 20 nt, synthetic construct
  source 1..20: mol_type = other RNA
aaagaaaaattagccaggca

SEQ ID NO: 6944 - RNA, 20 nt, synthetic construct
  source 1..20: mol_type = other RNA
caggcgcccactgccatgcc

SEQ ID NO: 6945 - RNA, 20 nt, synthetic construct
  source 1..20: mol_type = other RNA
aaattagccaggcatggcag

SEQ ID NO: 6946 - RNA, 20 nt, synthetic construct
  source 1..20: mol_type = other RNA
aattagccaggcatggcagt

SEQ ID NO: 6947 - RNA, 20 nt, synthetic construct
  source 1..20: mol_type = other RNA
tcctgagtagctgggactac

SEQ ID NO: 6948 - RNA, 20 nt, synthetic construct
  source 1..20: mol_type = other RNA
cctcagcctcctgagtagct

SEQ ID NO: 6949 - RNA, 20 nt, synthetic construct
  source 1..20: mol_type = other RNA
acctcagcctcctgagtagc

SEQ ID NO: 6950 - RNA, 20 nt, synthetic construct
  source 1..20: mol_type = other RNA
gcctgtagtcccagctactc

SEQ ID NO: 6951 - RNA, 20 nt, synthetic construct
  source 1..20: mol_type = other RNA
tgtagtcccagctactcagg

SEQ ID NO: 6952 - RNA, 20 nt, synthetic construct
  source 1..20: mol_type = other RNA
cccagctactcaggaggctg

SEQ ID NO: 6953 - RNA, 20 nt, synthetic construct
  source 1..20: mol_type = other RNA
agctactcaggaggctgagg

SEQ ID NO: 6954 - RNA, 20 nt, synthetic construct
  source 1..20: mol_type = other RNA
gctactcaggaggctgaggt

SEQ ID NO: 6955 - RNA, 20 nt, synthetic construct
  source 1..20: mol_type = other RNA
actcaggaggctgaggtggg

SEQ ID NO: 6956 - RNA, 20 nt, synthetic construct
  source 1..20: mol_type = other RNA
gaggattgcttgagcctgtg

SEQ ID NO: 6957 - RNA, 20 nt, synthetic construct
  source 1..20: mol_type = other RNA
caccacagcttcaacctcac

SEQ ID NO: 6958 - RNA, 20 nt, synthetic construct
  source 1..20: mol_type = other RNA
agcctgtgaggttgaagctg

SEQ ID NO: 6959 - RNA, 20 nt, synthetic construct
  source 1..20: mol_type = other RNA
ctgtgaggttgaagctgtgg

SEQ ID NO: 6960 - RNA, 20 nt, synthetic construct
  source 1..20: mol_type = other RNA
ggcgtgcaatggcacaatca

SEQ ID NO: 6961 - RNA, 20 nt, synthetic construct
  source 1..20: mol_type = other RNA
tcgcccaggctggcgtgcaa

SEQ ID NO: 6962 - RNA, 20 nt, synthetic construct
  source 1..20: mol_type = other RNA
tgtgccattgcacgccagcc

SEQ ID NO: 6963 - RNA, 20 nt, synthetic construct
  source 1..20: mol_type = other RNA
gtgccattgcacgccagcct

SEQ ID NO: 6964 - RNA, 20 nt, synthetic construct
  source 1..20: mol_type = other RNA
tctcactatgtcgcccaggc

SEQ ID NO: 6965 - RNA, 20 nt, synthetic construct
  source 1..20: mol_type = other RNA
ggggtctcactatgtcgccc

SEQ ID NO: 6966 - RNA, 20 nt, synthetic construct
  source 1..20: mol_type = other RNA
ttgatttttttgtagagatg

SEQ ID NO: 6967 - RNA, 20 nt, synthetic construct
  source 1..20: mol_type = other RNA
tttgatttttttgtagagat

SEQ ID NO: 6968 - RNA, 20 nt, synthetic construct
  source 1..20: mol_type = other RNA
ttttgatttttttgtagaga

SEQ ID NO: 6969 - RNA, 20 nt, synthetic construct
  source 1..20: mol_type = other RNA
aaaaaaatcaaaaaattatc

SEQ ID NO: 6970 - RNA, 20 nt, synthetic construct
  source 1..20: mol_type = other RNA
aaaaaatcaaaaaattatct

SEQ ID NO: 6971 - RNA, 20 nt, synthetic construct
  source 1..20: mol_type = other RNA
atcaaaaaattatctgggca

SEQ ID NO: 6972 - RNA, 20 nt, synthetic construct
  source 1..20: mol_type = other RNA
ggcatggtgtcacatgtctg

SEQ ID NO: 6973 - RNA, 20 nt, synthetic construct
  source 1..20: mol_type = other RNA
actccacctcccaagtagct

SEQ ID NO: 6974 - RNA, 20 nt, synthetic construct
  source 1..20: mol_type = other RNA
tgtctgtggtcccagctact

SEQ ID NO: 6975 - RNA, 20 nt, synthetic construct
  source 1..20: mol_type = other RNA
gactccacctcccaagtagc

SEQ ID NO: 6976 - RNA, 20 nt, synthetic construct
  source 1..20: mol_type = other RNA
gtctgtggtcccagctactt

SEQ ID NO: 6977 - RNA, 20 nt, synthetic construct
  source 1..20: mol_type = other RNA
tgtggtcccagctacttggg

SEQ ID NO: 6978 - RNA, 20 nt, synthetic construct
  source 1..20: mol_type = other RNA
ggtcccagctacttgggagg

SEQ ID NO: 6979 - RNA, 20 nt, synthetic construct
  source 1..20: mol_type = other RNA
gctacttgggaggtggagtc

SEQ ID NO: 6980 - RNA, 20 nt, synthetic construct
  source 1..20: mol_type = other RNA
acttgggaggtggagtcagg

SEQ ID NO: 6981 - RNA, 20 nt, synthetic construct
  source 1..20: mol_type = other RNA
caggaggatcgcatgagccc

SEQ ID NO: 6982 - RNA, 20 nt, synthetic construct
  source 1..20: mol_type = other RNA
gaggatcgcatgagcccagg

SEQ ID NO: 6983 - RNA, 20 nt, synthetic construct
  source 1..20: mol_type = other RNA
cgctgcaacctcaacctcct

SEQ ID NO: 6984 - RNA, 20 nt, synthetic construct
  source 1..20: mol_type = other RNA
tcgctgcaacctcaacctcc

SEQ ID NO: 6985 - RNA, 20 nt, synthetic construct
  source 1..20: mol_type = other RNA
cgcatgagcccaggaggttg

SEQ ID NO: 6986 - RNA, 20 nt, synthetic construct
  source 1..20: mol_type = other RNA
ttgcccaggctggaatgcag

SEQ ID NO: 6987 - RNA, 20 nt, synthetic construct
  source 1..20: mol_type = other RNA
cacaccactgcattccagcc

SEQ ID NO: 6988 - RNA, 20 nt, synthetic construct
  source 1..20: mol_type = other RNA
acaccactgcattccagcct

SEQ ID NO: 6989 - RNA, 20 nt, synthetic construct
  source 1..20: mol_type = other RNA
tctggcttttttgcccaggc

SEQ ID NO: 6990 - RNA, 20 nt, synthetic construct
  source 1..20: mol_type = other RNA
agggtctggcttttttgccc

SEQ ID NO: 6991 - RNA, 20 nt, synthetic construct
  source 1..20: mol_type = other RNA
ttttgttttgagacagggtc

SEQ ID NO: 6992 - RNA, 20 nt, synthetic construct
  source 1..20: mol_type = other RNA
ttttgttttgttttgagaca

SEQ ID NO: 6993 - RNA, 20 nt, synthetic construct
  source 1..20: mol_type = other RNA
gttttgttttgttttgagac

SEQ ID NO: 6994 - RNA, 20 nt, synthetic construct
  source 1..20: mol_type = other RNA
aaacaaacaaaaaaactgtg

SEQ ID NO: 6995 - RNA, 20 nt, synthetic construct
  source 1..20: mol_type = other RNA
aacaaacaaaaaaactgtgt

SEQ ID NO: 6996 - RNA, 20 nt, synthetic construct
  source 1..20: mol_type = other RNA
acaaacaaaaaaactgtgtg

SEQ ID NO: 6997 - RNA, 20 nt, synthetic construct
  source 1..20: mol_type = other RNA
tggggaacagatgtaaatga

SEQ ID NO: 6998 - RNA, 20 nt, synthetic construct
  source 1..20: mol_type = other RNA
ggaacagatgtaaatgatgg

SEQ ID NO: 6999 - RNA, 20 nt, synthetic construct
  source 1..20: mol_type = other RNA
gtaaatgatggtggcagtgc

SEQ ID NO: 7000 - RNA, 20 nt, synthetic construct
  source 1..20: mol_type = other RNA
tggtggcagtgctggccttg

SEQ ID NO: 7001 - RNA, 20 nt, synthetic construct
  source 1..20: mol_type = other RNA
tggcagtgctggccttgtgg

SEQ ID NO: 7002 - RNA, 20 nt, synthetic construct
  source 1..20: mol_type = other RNA
ggccagggccagccaccaca

SEQ ID NO: 7003 - RNA, 20 nt, synthetic construct
  source 1..20: mol_type = other RNA
agtgctggccttgtggtggc

SEQ ID NO: 7004 - RNA, 20 nt, synthetic construct
  source 1..20: mol_type = other RNA
ggccttgtggtggctggccc

SEQ ID NO: 7005 - RNA, 20 nt, synthetic construct
  source 1..20: mol_type = other RNA
gtatgtgagaggcagggcca

SEQ ID NO: 7006 - RNA, 20 nt, synthetic construct
  source 1..20: mol_type = other RNA
ggtatgtgagaggcagggcc

SEQ ID NO: 7007 - RNA, 20 nt, synthetic construct
  source 1..20: mol_type = other RNA
gtgggggtatgtgagaggca

SEQ ID NO: 7008 - RNA, 20 nt, synthetic construct
  source 1..20: mol_type = other RNA
ggtgggggtatgtgagaggc

SEQ ID NO: 7009 - RNA, 20 nt, synthetic construct
  source 1..20: mol_type = other RNA
tcagggtgggggtatgtgag

SEQ ID NO: 7010 - RNA, 20 nt, synthetic construct
  source 1..20: mol_type = other RNA
ccaggggcgtgtcagggtgg

SEQ ID NO: 7011 - RNA, 20 nt, synthetic construct
  source 1..20: mol_type = other RNA
gccaggggcgtgtcagggtg

SEQ ID NO: 7012 - RNA, 20 nt, synthetic construct
  source 1..20: mol_type = other RNA
ggccaggggcgtgtcagggt

SEQ ID NO: 7013 - RNA, 20 nt, synthetic construct
  source 1..20: mol_type = other RNA
aggccaggggcgtgtcaggg

SEQ ID NO: 7014 - RNA, 20 nt, synthetic construct
  source 1..20: mol_type = other RNA
caaaggccaggggcgtgtca

SEQ ID NO: 7015 - RNA, 20 nt, synthetic construct
  source 1..20: mol_type = other RNA
gcaaaggccaggggcgtgtc

SEQ ID NO: 7016 - RNA, 20 nt, synthetic construct
  source 1..20: mol_type = other RNA
cccccaccctgacacgcccc

SEQ ID NO: 7017 - RNA, 20 nt, synthetic construct
  source 1..20: mol_type = other RNA
accggctctgcaaaggccag

SEQ ID NO: 7018 - RNA, 20 nt, synthetic construct
  source 1..20: mol_type = other RNA
caccggctctgcaaaggcca

SEQ ID NO: 7019 - RNA, 20 nt, synthetic construct
  source 1..20: mol_type = other RNA
ccaccggctctgcaaaggcc

SEQ ID NO: 7020 - RNA, 20 nt, synthetic construct
  source 1..20: mol_type = other RNA
ctgctccaccggctctgcaa

SEQ ID NO: 7021 - RNA, 20 nt, synthetic construct
  source 1..20: mol_type = other RNA
gcccctggcctttgcagagc

SEQ ID NO: 7022 - RNA, 20 nt, synthetic construct
  source 1..20: mol_type = other RNA
cctggcctttgcagagccgg

SEQ ID NO: 7023 - RNA, 20 nt, synthetic construct
  source 1..20: mol_type = other RNA
gagcggtagaactgctccac

SEQ ID NO: 7024 - RNA, 20 nt, synthetic construct
  source 1..20: mol_type = other RNA
catacgtgtcctgcagtgag

SEQ ID NO: 7025 - RNA, 20 nt, synthetic construct
  source 1..20: mol_type = other RNA
gcagttctaccgctcactgc

SEQ ID NO: 7026 - RNA, 20 nt, synthetic construct
  source 1..20: mol_type = other RNA
cgctcactgcaggacacgta

SEQ ID NO: 7027 - RNA, 20 nt, synthetic construct
  source 1..20: mol_type = other RNA
gccatccgggcctgcgggct

SEQ ID NO: 7028 - RNA, 20 nt, synthetic construct
  source 1..20: mol_type = other RNA
acgtatggtgccgagcccgc

SEQ ID NO: 7029 - RNA, 20 nt, synthetic construct
  source 1..20: mol_type = other RNA
aggatgccatccgggcctgc

SEQ ID NO: 7030 - RNA, 20 nt, synthetic construct
  source 1..20: mol_type = other RNA
tggtgccgagcccgcaggcc

SEQ ID NO: 7031 - RNA, 20 nt, synthetic construct
  source 1..20: mol_type = other RNA
taggatgccatccgggcctg

SEQ ID NO: 7032 - RNA, 20 nt, synthetic construct
  source 1..20: mol_type = other RNA
gccgagcccgcaggcccgga

SEQ ID NO: 7033 - RNA, 20 nt, synthetic construct
  source 1..20: mol_type = other RNA
cctccactaggatgccatcc

SEQ ID NO: 7034 - RNA, 20 nt, synthetic construct
  source 1..20: mol_type = other RNA
acctccactaggatgccatc

SEQ ID NO: 7035 - RNA, 20 nt, synthetic construct
  source 1..20: mol_type = other RNA
aggcccggatggcatcctag

SEQ ID NO: 7036 - RNA, 20 nt, synthetic construct
  source 1..20: mol_type = other RNA
cccggatggcatcctagtgg

SEQ ID NO: 7037 - RNA, 20 nt, synthetic construct
  source 1..20: mol_type = other RNA
gcaccagatccacctccact

SEQ ID NO: 7038 - RNA, 20 nt, synthetic construct
  source 1..20: mol_type = other RNA
ggatggcatcctagtggagg

SEQ ID NO: 7039 - RNA, 20 nt, synthetic construct
  source 1..20: mol_type = other RNA
catcctagtggaggtggatc

SEQ ID NO: 7040 - RNA, 20 nt, synthetic construct
  source 1..20: mol_type = other RNA
agtggaggtggatctggtgc

SEQ ID NO: 7041 - RNA, 20 nt, synthetic construct
  source 1..20: mol_type = other RNA
aggtggatctggtgcaggcc

SEQ ID NO: 7042 - RNA, 20 nt, synthetic construct
  source 1..20: mol_type = other RNA
ggatctggtgcaggccaggc

SEQ ID NO: 7043 - RNA, 20 nt, synthetic construct
  source 1..20: mol_type = other RNA
gctgctgctcctctccagcc

SEQ ID NO: 7044 - RNA, 20 nt, synthetic construct
  source 1..20: mol_type = other RNA
tggtgcaggccaggctggag

SEQ ID NO: 7045 - RNA, 20 nt, synthetic construct
  source 1..20: mol_type = other RNA
gaggagcagcagcaagagcc

SEQ ID NO: 7046 - RNA, 20 nt, synthetic construct
  source 1..20: mol_type = other RNA
gcagcagcaagagcctggag

SEQ ID NO: 7047 - RNA, 20 nt, synthetic construct
  source 1..20: mol_type = other RNA
cagcagcaagagcctggagc

SEQ ID NO: 7048 - RNA, 20 nt, synthetic construct
  source 1..20: mol_type = other RNA
gggtggccagttcccgctcc

SEQ ID NO: 7049 - RNA, 20 nt, synthetic construct
  source 1..20: mol_type = other RNA
caagagcctggagcgggaac

SEQ ID NO: 7050 - RNA, 20 nt, synthetic construct
  source 1..20: mol_type = other RNA
ggagcgggaactggccaccc

SEQ ID NO: 7051 - RNA, 20 nt, synthetic construct
  source 1..20: mol_type = other RNA
ccgttctgcccagtccgggg

SEQ ID NO: 7052 - RNA, 20 nt, synthetic construct
  source 1..20: mol_type = other RNA
gggaactggccaccccggac

SEQ ID NO: 7053 - RNA, 20 nt, synthetic construct
  source 1..20: mol_type = other RNA
ggaactggccaccccggact

SEQ ID NO: 7054 - RNA, 20 nt, synthetic construct
  source 1..20: mol_type = other RNA
ctgccgttctgcccagtccg

SEQ ID NO: 7055 - RNA, 20 nt, synthetic construct
  source 1..20: mol_type = other RNA
gctgccgttctgcccagtcc

SEQ ID NO: 7056 - RNA, 20 nt, synthetic construct
  source 1..20: mol_type = other RNA
agctgccgttctgcccagtc

SEQ ID NO: 7057 - RNA, 20 nt, synthetic construct
  source 1..20: mol_type = other RNA
ccaccccggactgggcagaa

SEQ ID NO: 7058 - RNA, 20 nt, synthetic construct
  source 1..20: mol_type = other RNA
ggactgggcagaacggcagc

SEQ ID NO: 7059 - RNA, 20 nt, synthetic construct
  source 1..20: mol_type = other RNA
gcagaacggcagctggccca

SEQ ID NO: 7060 - RNA, 20 nt, synthetic construct
  source 1..20: mol_type = other RNA
gaacggcagctggcccaagg

SEQ ID NO: 7061 - RNA, 20 nt, synthetic construct
  source 1..20: mol_type = other RNA
cacctcagccaggcctcctt

SEQ ID NO: 7062 - RNA, 20 nt, synthetic construct
  source 1..20: mol_type = other RNA
gcacctcagccaggcctcct

SEQ ID NO: 7063 - RNA, 20 nt, synthetic construct
  source 1..20: mol_type = other RNA
gcagctggcccaaggaggcc

SEQ ID NO: 7064 - RNA, 20 nt, synthetic construct
  source 1..20: mol_type = other RNA
ggcccaaggaggcctggctg

SEQ ID NO: 7065 - RNA, 20 nt, synthetic construct
  source 1..20: mol_type = other RNA
cagccaacagcacctcagcc

SEQ ID NO: 7066 - RNA, 20 nt, synthetic construct
  source 1..20: mol_type = other RNA
aggcctggctgaggtgctgt

SEQ ID NO: 7067 - RNA, 20 nt, synthetic construct
  source 1..20: mol_type = other RNA
tgaggtgctgttggctgcca

SEQ ID NO: 7068 - RNA, 20 nt, synthetic construct
  source 1..20: mol_type = other RNA
acgcggccgccggtgctcct

SEQ ID NO: 7069 - RNA, 20 nt, synthetic construct
  source 1..20: mol_type = other RNA
tgttggctgccaaggagcac

SEQ ID NO: 7070 - RNA, 20 nt, synthetic construct
  source 1..20: mol_type = other RNA
tggctgccaaggagcaccgg

SEQ ID NO: 7071 - RNA, 20 nt, synthetic construct
  source 1..20: mol_type = other RNA
ctcgtgtctcacgcggccgc

SEQ ID NO: 7072 - RNA, 20 nt, synthetic construct
  source 1..20: mol_type = other RNA
gcaatcactcgtgtctcacg

SEQ ID NO: 7073 - RNA, 20 nt, synthetic construct
  source 1..20: mol_type = other RNA
gacacgagtgattgctgtgc

SEQ ID NO: 7074 - RNA, 20 nt, synthetic construct
  source 1..20: mol_type = other RNA
acacgagtgattgctgtgct

SEQ ID NO: 7075 - RNA, 20 nt, synthetic construct
  source 1..20: mol_type = other RNA
attgctgtgctgggcaaagc

SEQ ID NO: 7076 - RNA, 20 nt, synthetic construct
  source 1..20: mol_type = other RNA
tgtgctgggcaaagctggtc

SEQ ID NO: 7077 - RNA, 20 nt, synthetic construct
  source 1..20: mol_type = other RNA
gtgctgggcaaagctggtca

SEQ ID NO: 7078 - RNA, 20 nt, synthetic construct
  source 1..20: mol_type = other RNA
ctggtcagggcaagagctat

SEQ ID NO: 7079 - RNA, 20 nt, synthetic construct
  source 1..20: mol_type = other RNA
tggtcagggcaagagctatt

SEQ ID NO: 7080 - RNA, 20 nt, synthetic construct
  source 1..20: mol_type = other RNA
cagggcaagagctattgggc

SEQ ID NO: 7081 - RNA, 20 nt, synthetic construct
  source 1..20: mol_type = other RNA
agggcaagagctattgggct

SEQ ID NO: 7082 - RNA, 20 nt, synthetic construct
  source 1..20: mol_type = other RNA
gggcaagagctattgggctg

SEQ ID NO: 7083 - RNA, 20 nt, synthetic construct
  source 1..20: mol_type = other RNA
attgggctggggcagtgagc

SEQ ID NO: 7084 - RNA, 20 nt, synthetic construct
  source 1..20: mol_type = other RNA
ttgggctggggcagtgagcc

SEQ ID NO: 7085 - RNA, 20 nt, synthetic construct
  source 1..20: mol_type = other RNA
ctggggcagtgagccgggcc

SEQ ID NO: 7086 - RNA, 20 nt, synthetic construct
  source 1..20: mol_type = other RNA
tggggcagtgagccgggcct

SEQ ID NO: 7087 - RNA, 20 nt, synthetic construct
  source 1..20: mol_type = other RNA
gccggccacaagcccaggcc

SEQ ID NO: 7088 - RNA, 20 nt, synthetic construct
  source 1..20: mol_type = other RNA
gggaagccggccacaagccc

SEQ ID NO: 7089 - RNA, 20 nt, synthetic construct
  source 1..20: mol_type = other RNA
gtgagccgggcctgggcttg

SEQ ID NO: 7090 - RNA, 20 nt, synthetic construct
  source 1..20: mol_type = other RNA
gccgggcctgggcttgtggc

SEQ ID NO: 7091 - RNA, 20 nt, synthetic construct
  source 1..20: mol_type = other RNA
caaagtcgtactggggaagc

SEQ ID NO: 7092 - RNA, 20 nt, synthetic construct
  source 1..20: mol_type = other RNA
gagaagacaaagtcgtactg

SEQ ID NO: 7093 - RNA, 20 nt, synthetic construct
  source 1..20: mol_type = other RNA
agagaagacaaagtcgtact

SEQ ID NO: 7094 - RNA, 20 nt, synthetic construct
  source 1..20: mol_type = other RNA
cagagaagacaaagtcgtac

SEQ ID NO: 7095 - RNA, 20 nt, synthetic construct
  source 1..20: mol_type = other RNA
gacggttcaagcaatggcag

SEQ ID NO: 7096 - RNA, 20 nt, synthetic construct
  source 1..20: mol_type = other RNA
ggacggttcaagcaatggca

SEQ ID NO: 7097 - RNA, 20 nt, synthetic construct
  source 1..20: mol_type = other RNA
cggacggttcaagcaatggc

SEQ ID NO: 7098 - RNA, 20 nt, synthetic construct
  source 1..20: mol_type = other RNA
cccccggacggttcaagcaa

SEQ ID NO: 7099 - RNA, 20 nt, synthetic construct
  source 1..20: mol_type = other RNA
ctgccattgcttgaaccgtc

SEQ ID NO: 7100 - RNA, 20 nt, synthetic construct
  source 1..20: mol_type = other RNA
tgccattgcttgaaccgtcc

SEQ ID NO: 7101 - RNA, 20 nt, synthetic construct
  source 1..20: mol_type = other RNA
gccattgcttgaaccgtccg

SEQ ID NO: 7102 - RNA, 20 nt, synthetic construct
  source 1..20: mol_type = other RNA
ccattgcttgaaccgtccgg

SEQ ID NO: 7103 - RNA, 20 nt, synthetic construct
  source 1..20: mol_type = other RNA
ggccataggcatcccccgga

SEQ ID NO: 7104 - RNA, 20 nt, synthetic construct
  source 1..20: mol_type = other RNA
tgcaggccataggcatcccc

SEQ ID NO: 7105 - RNA, 20 nt, synthetic construct
  source 1..20: mol_type = other RNA
aaccgtccgggggatgccta

SEQ ID NO: 7106 - RNA, 20 nt, synthetic construct
  source 1..20: mol_type = other RNA
gagcagatcctgcaggccat

SEQ ID NO: 7107 - RNA, 20 nt, synthetic construct
  source 1..20: mol_type = other RNA
gggggatgcctatggcctgc

SEQ ID NO: 7108 - RNA, 20 nt, synthetic construct
  source 1..20: mol_type = other RNA
gggagaagagcagatcctgc

SEQ ID NO: 7109 - RNA, 20 nt, synthetic construct
  source 1..20: mol_type = other RNA
gcaggatctgctcttctccc

SEQ ID NO: 7110 - RNA, 20 nt, synthetic construct
  source 1..20: mol_type = other RNA
caggatctgctcttctccct

SEQ ID NO: 7111 - RNA, 20 nt, synthetic construct
  source 1..20: mol_type = other RNA
cacgagtggctgtgggccca

SEQ ID NO: 7112 - RNA, 20 nt, synthetic construct
  source 1..20: mol_type = other RNA
ccacgagtggctgtgggccc

SEQ ID NO: 7113 - RNA, 20 nt, synthetic construct
  source 1..20: mol_type = other RNA
cggccgccacgagtggctgt

SEQ ID NO: 7114 - RNA, 20 nt, synthetic construct
  source 1..20: mol_type = other RNA
tcggccgccacgagtggctg

SEQ ID NO: 7115 - RNA, 20 nt, synthetic construct
  source 1..20: mol_type = other RNA
cctgggcccacagccactcg

SEQ ID NO: 7116 - RNA, 20 nt, synthetic construct
  source 1..20: mol_type = other RNA
acctcatcggccgccacgag

SEQ ID NO: 7117 - RNA, 20 nt, synthetic construct
  source 1..20: mol_type = other RNA
gggcccacagccactcgtgg

SEQ ID NO: 7118 - RNA, 20 nt, synthetic construct
  source 1..20: mol_type = other RNA
gccactcgtggcggccgatg

SEQ ID NO: 7119 - RNA, 20 nt, synthetic construct
  source 1..20: mol_type = other RNA
gatgtggctgaaaacctcat

SEQ ID NO: 7120 - RNA, 20 nt, synthetic construct
  source 1..20: mol_type = other RNA
ggtcaggtctcttcaagatg

SEQ ID NO: 7121 - RNA, 20 nt, synthetic construct
  source 1..20: mol_type = other RNA
aggatgagcagaacgcggtc

SEQ ID NO: 7122 - RNA, 20 nt, synthetic construct
  source 1..20: mol_type = other RNA
cgtctaggatgagcagaacg

SEQ ID NO: 7123 - RNA, 20 nt, synthetic construct
  source 1..20: mol_type = other RNA
cgcgttctgctcatcctaga

SEQ ID NO: 7124 - RNA, 20 nt, synthetic construct
  source 1..20: mol_type = other RNA
ccagctcctcgaagccgtct

SEQ ID NO: 7125 - RNA, 20 nt, synthetic construct
  source 1..20: mol_type = other RNA
gctcatcctagacggcttcg

SEQ ID NO: 7126 - RNA, 20 nt, synthetic construct
  source 1..20: mol_type = other RNA
cctagacggcttcgaggagc

SEQ ID NO: 7127 - RNA, 20 nt, synthetic construct
  source 1..20: mol_type = other RNA
gaggagctggaagcgcaaga

SEQ ID NO: 7128 - RNA, 20 nt, synthetic construct
  source 1..20: mol_type = other RNA
ccggtccgcacgtgctgtgc

SEQ ID NO: 7129 - RNA, 20 nt, synthetic construct
  source 1..20: mol_type = other RNA
ggcttcctgcacagcacgtg

SEQ ID NO: 7130 - RNA, 20 nt, synthetic construct
  source 1..20: mol_type = other RNA
cctgcacagcacgtgcggac

SEQ ID NO: 7131 - RNA, 20 nt, synthetic construct
  source 1..20: mol_type = other RNA
cagcacgtgcggaccggcac

SEQ ID NO: 7132 - RNA, 20 nt, synthetic construct
  source 1..20: mol_type = other RNA
gagcagggctccgccggtgc

SEQ ID NO: 7133 - RNA, 20 nt, synthetic construct
  source 1..20: mol_type = other RNA
cacgtgcggaccggcaccgg

SEQ ID NO: 7134 - RNA, 20 nt, synthetic construct
  source 1..20: mol_type = other RNA
cggagggagcagggctccgc

SEQ ID NO: 7135 - RNA, 20 nt, synthetic construct
  source 1..20: mol_type = other RNA
agcagcccccggagggagca

SEQ ID NO: 7136 - RNA, 20 nt, synthetic construct
  source 1..20: mol_type = other RNA
cagcagcccccggagggagc

SEQ ID NO: 7137 - RNA, 20 nt, synthetic construct
  source 1..20: mol_type = other RNA
cggcggagccctgctccctc

SEQ ID NO: 7138 - RNA, 20 nt, synthetic construct
  source 1..20: mol_type = other RNA
ggcggagccctgctccctcc

SEQ ID NO: 7139 - RNA, 20 nt, synthetic construct
  source 1..20: mol_type = other RNA
gcggagccctgctccctccg

SEQ ID NO: 7140 - RNA, 20 nt, synthetic construct
  source 1..20: mol_type = other RNA
cggagccctgctccctccgg

SEQ ID NO: 7141 - RNA, 20 nt, synthetic construct
  source 1..20: mol_type = other RNA
gccggccagcagcccccgga

SEQ ID NO: 7142 - RNA, 20 nt, synthetic construct
  source 1..20: mol_type = other RNA
ggccggccagcagcccccgg

SEQ ID NO: 7143 - RNA, 20 nt, synthetic construct
  source 1..20: mol_type = other RNA
aaaggccggccagcagcccc

SEQ ID NO: 7144 - RNA, 20 nt, synthetic construct
  source 1..20: mol_type = other RNA
ctgctccctccgggggctgc

SEQ ID NO: 7145 - RNA, 20 nt, synthetic construct
  source 1..20: mol_type = other RNA
tccctccgggggctgctggc

SEQ ID NO: 7146 - RNA, 20 nt, synthetic construct
  source 1..20: mol_type = other RNA
cagcttcttctggaaaaggc

SEQ ID NO: 7147 - RNA, 20 nt, synthetic construct
  source 1..20: mol_type = other RNA
ggagcagcttcttctggaaa

SEQ ID NO: 7148 - RNA, 20 nt, synthetic construct
  source 1..20: mol_type = other RNA
aacctcggagcagcttcttc

SEQ ID NO: 7149 - RNA, 20 nt, synthetic construct
  source 1..20: mol_type = other RNA
ttccagaagaagctgctccg

SEQ ID NO: 7150 - RNA, 20 nt, synthetic construct
  source 1..20: mol_type = other RNA
tgaggaggagggtgcaacct

SEQ ID NO: 7151 - RNA, 20 nt, synthetic construct
  source 1..20: mol_type = other RNA
gggccgggctgtgaggagga

SEQ ID NO: 7152 - RNA, 20 nt, synthetic construct
  source 1..20: mol_type = other RNA
ggggccgggctgtgaggagg

SEQ ID NO: 7153 - RNA, 20 nt, synthetic construct
  source 1..20: mol_type = other RNA
cccggggccgggctgtgagg

SEQ ID NO: 7154 - RNA, 20 nt, synthetic construct
  source 1..20: mol_type = other RNA
ggccccggggccgggctgtg

SEQ ID NO: 7155 - RNA, 20 nt, synthetic construct
  source 1..20: mol_type = other RNA
gcaccctcctcctcacagcc

SEQ ID NO: 7156 - RNA, 20 nt, synthetic construct
  source 1..20: mol_type = other RNA
tcctcctcacagcccggccc

SEQ ID NO: 7157 - RNA, 20 nt, synthetic construct
  source 1..20: mol_type = other RNA
cctcctcacagcccggcccc

SEQ ID NO: 7158 - RNA, 20 nt, synthetic construct
  source 1..20: mol_type = other RNA
gaccaggcggccccggggcc

SEQ ID NO: 7159 - RNA, 20 nt, synthetic construct
  source 1..20: mol_type = other RNA
ctcctcacagcccggccccg

SEQ ID NO: 7160 - RNA, 20 nt, synthetic construct
  source 1..20: mol_type = other RNA
ggaccaggcggccccggggc

SEQ ID NO: 7161 - RNA, 20 nt, synthetic construct
  source 1..20: mol_type = other RNA
ctctggaccaggcggccccg

SEQ ID NO: 7162 - RNA, 20 nt, synthetic construct
  source 1..20: mol_type = other RNA
gctctggaccaggcggcccc

SEQ ID NO: 7163 - RNA, 20 nt, synthetic construct
  source 1..20: mol_type = other RNA
ggctctggaccaggcggccc

SEQ ID NO: 7164 - RNA, 20 nt, synthetic construct
  source 1..20: mol_type = other RNA
agcccggccccggggccgcc

SEQ ID NO: 7165 - RNA, 20 nt, synthetic construct
  source 1..20: mol_type = other RNA
tgctcaggctctggaccagg

SEQ ID NO: 7166 - RNA, 20 nt, synthetic construct
  source 1..20: mol_type = other RNA
ccttgctcaggctctggacc

SEQ ID NO: 7167 - RNA, 20 nt, synthetic construct
  source 1..20: mol_type = other RNA
cgtcggccttgctcaggctc

SEQ ID NO: 7168 - RNA, 20 nt, synthetic construct
  source 1..20: mol_type = other RNA
cctggtccagagcctgagca

SEQ ID NO: 7169 - RNA, 20 nt, synthetic construct
  source 1..20: mol_type = other RNA
atagggcgtcggccttgctc

SEQ ID NO: 7170 - RNA, 20 nt, synthetic construct
  source 1..20: mol_type = other RNA
ggacagctcaaatagggcgt

SEQ ID NO: 7171 - RNA, 20 nt, synthetic construct
  source 1..20: mol_type = other RNA
gaagccggacagctcaaata

SEQ ID NO: 7172 - RNA, 20 nt, synthetic construct
  source 1..20: mol_type = other RNA
agaagccggacagctcaaat

SEQ ID NO: 7173 - RNA, 20 nt, synthetic construct
  source 1..20: mol_type = other RNA
gacgccctatttgagctgtc

SEQ ID NO: 7174 - RNA, 20 nt, synthetic construct
  source 1..20: mol_type = other RNA
ggcctgctccatggagaagc

SEQ ID NO: 7175 - RNA, 20 nt, synthetic construct
  source 1..20: mol_type = other RNA
tgagctgtccggcttctcca

SEQ ID NO: 7176 - RNA, 20 nt, synthetic construct
  source 1..20: mol_type = other RNA
gtccggcttctccatggagc

SEQ ID NO: 7177 - RNA, 20 nt, synthetic construct
  source 1..20: mol_type = other RNA
gtatgcctgggcctgctcca

SEQ ID NO: 7178 - RNA, 20 nt, synthetic construct
  source 1..20: mol_type = other RNA
cttctccatggagcaggccc

SEQ ID NO: 7179 - RNA, 20 nt, synthetic construct
  source 1..20: mol_type = other RNA
gtagcgcatcacgtatgcct

SEQ ID NO: 7180 - RNA, 20 nt, synthetic construct
  source 1..20: mol_type = other RNA
agtagcgcatcacgtatgcc

SEQ ID NO: 7181 - RNA, 20 nt, synthetic construct
  source 1..20: mol_type = other RNA
atgcgctactttgagagctc

SEQ ID NO: 7182 - RNA, 20 nt, synthetic construct
  source 1..20: mol_type = other RNA
tgcgctactttgagagctca

SEQ ID NO: 7183 - RNA, 20 nt, synthetic construct
  source 1..20: mol_type = other RNA
ggagcgtcagggctctgtct

SEQ ID NO: 7184 - RNA, 20 nt, synthetic construct
  source 1..20: mol_type = other RNA
ccggtcccggaggagcgtca

SEQ ID NO: 7185 - RNA, 20 nt, synthetic construct
  source 1..20: mol_type = other RNA
gccggtcccggaggagcgtc

SEQ ID NO: 7186 - RNA, 20 nt, synthetic construct
  source 1..20: mol_type = other RNA
acagagccctgacgctcctc

SEQ ID NO: 7187 - RNA, 20 nt, synthetic construct
  source 1..20: mol_type = other RNA
cagagccctgacgctcctcc

SEQ ID NO: 7188 - RNA, 20 nt, synthetic construct
  source 1..20: mol_type = other RNA
gaagaagtggccggtcccgg

SEQ ID NO: 7189 - RNA, 20 nt, synthetic construct
  source 1..20: mol_type = other RNA
ccctgacgctcctccgggac

SEQ ID NO: 7190 - RNA, 20 nt, synthetic construct
  source 1..20: mol_type = other RNA
tgagaagaagtggccggtcc

SEQ ID NO: 7191 - RNA, 20 nt, synthetic construct
  source 1..20: mol_type = other RNA
tgtgactgagaagaagtggc

SEQ ID NO: 7192 - RNA, 20 nt, synthetic construct
  source 1..20: mol_type = other RNA
tggctgtgactgagaagaag

SEQ ID NO: 7193 - RNA, 20 nt, synthetic construct
  source 1..20: mol_type = other RNA
cccggcacaaagtagggctg

SEQ ID NO: 7194 - RNA, 20 nt, synthetic construct
  source 1..20: mol_type = other RNA
acactgcccggcacaaagta

SEQ ID NO: 7195 - RNA, 20 nt, synthetic construct
  source 1..20: mol_type = other RNA
cacactgcccggcacaaagt

SEQ ID NO: 7196 - RNA, 20 nt, synthetic construct
  source 1..20: mol_type = other RNA
gccacagccctactttgtgc

SEQ ID NO: 7197 - RNA, 20 nt, synthetic construct
  source 1..20: mol_type = other RNA
ccacagccctactttgtgcc

SEQ ID NO: 7198 - RNA, 20 nt, synthetic construct
  source 1..20: mol_type = other RNA
ctgagagctggcacactgcc

SEQ ID NO: 7199 - RNA, 20 nt, synthetic construct
  source 1..20: mol_type = other RNA
ccagcagggcctctgagagc

SEQ ID NO: 7200 - RNA, 20 nt, synthetic construct
  source 1..20: mol_type = other RNA
ggcagtgtgccagctctcag

SEQ ID NO: 7201 - RNA, 20 nt, synthetic construct
  source 1..20: mol_type = other RNA
ccagctctcagaggccctgc

SEQ ID NO: 7202 - RNA, 20 nt, synthetic construct
  source 1..20: mol_type = other RNA
gtcctccccaagctccagca

SEQ ID NO: 7203 - RNA, 20 nt, synthetic construct
  source 1..20: mol_type = other RNA
cgtcctccccaagctccagc

SEQ ID NO: 7204 - RNA, 20 nt, synthetic construct
  source 1..20: mol_type = other RNA
tcagaggccctgctggagct

SEQ ID NO: 7205 - RNA, 20 nt, synthetic construct
  source 1..20: mol_type = other RNA
cagaggccctgctggagctt

SEQ ID NO: 7206 - RNA, 20 nt, synthetic construct
  source 1..20: mol_type = other RNA
agaggccctgctggagcttg

SEQ ID NO: 7207 - RNA, 20 nt, synthetic construct
  source 1..20: mol_type = other RNA
ggccctgctggagcttgggg

SEQ ID NO: 7208 - RNA, 20 nt, synthetic construct
  source 1..20: mol_type = other RNA
cgtgagcgtggagggcagct

SEQ ID NO: 7209 - RNA, 20 nt, synthetic construct
  source 1..20: mol_type = other RNA
tagagtcccgtgagcgtgga

SEQ ID NO: 7210 - RNA, 20 nt, synthetic construct
  source 1..20: mol_type = other RNA
atagagtcccgtgagcgtgg

SEQ ID NO: 7211 - RNA, 20 nt, synthetic construct
  source 1..20: mol_type = other RNA
caagctgccctccacgctca

SEQ ID NO: 7212 - RNA, 20 nt, synthetic construct
  source 1..20: mol_type = other RNA
gacatagagtcccgtgagcg

SEQ ID NO: 7213 - RNA, 20 nt, synthetic construct
  source 1..20: mol_type = other RNA
aagctgccctccacgctcac

SEQ ID NO: 7214 - RNA, 20 nt, synthetic construct
  source 1..20: mol_type = other RNA
acgctcacgggactctatgt

SEQ ID NO: 7215 - RNA, 20 nt, synthetic construct
  source 1..20: mol_type = other RNA
gggactctatgtcggcctgc

SEQ ID NO: 7216 - RNA, 20 nt, synthetic construct
  source 1..20: mol_type = other RNA
ggactctatgtcggcctgct

SEQ ID NO: 7217 - RNA, 20 nt, synthetic construct
  source 1..20: mol_type = other RNA
cgagggctgcacggcccagc

SEQ ID NO: 7218 - RNA, 20 nt, synthetic construct
  source 1..20: mol_type = other RNA
gggggctgtcgagggctgca

SEQ ID NO: 7219 - RNA, 20 nt, synthetic construct
  source 1..20: mol_type = other RNA
ggccccgggggggctgtcga

SEQ ID NO: 7220 - RNA, 20 nt, synthetic construct
  source 1..20: mol_type = other RNA
gggccccgggggggctgtcg

SEQ ID NO: 7221 - RNA, 20 nt, synthetic construct
  source 1..20: mol_type = other RNA
gcagccctcgacagcccccc

SEQ ID NO: 7222 - RNA, 20 nt, synthetic construct
  source 1..20: mol_type = other RNA
cagccctcgacagccccccc

SEQ ID NO: 7223 - RNA, 20 nt, synthetic construct
  source 1..20: mol_type = other RNA
agccctcgacagcccccccg

SEQ ID NO: 7224 - RNA, 20 nt, synthetic construct
  source 1..20: mol_type = other RNA
gctctgccagggccccgggg

SEQ ID NO: 7225 - RNA, 20 nt, synthetic construct
  source 1..20: mol_type = other RNA
agctctgccagggccccggg

SEQ ID NO: 7226 - RNA, 20 nt, synthetic construct
  source 1..20: mol_type = other RNA
cagctctgccagggccccgg

SEQ ID NO: 7227 - RNA, 20 nt, synthetic construct
  source 1..20: mol_type = other RNA
ccagctctgccagggccccg

SEQ ID NO: 7228 - RNA, 20 nt, synthetic construct
  source 1..20: mol_type = other RNA
gccagctctgccagggcccc

SEQ ID NO: 7229 - RNA, 20 nt, synthetic construct
  source 1..20: mol_type = other RNA
cgacagcccccccggggccc

SEQ ID NO: 7230 - RNA, 20 nt, synthetic construct
  source 1..20: mol_type = other RNA
ggccagctctgccagggccc

SEQ ID NO: 7231 - RNA, 20 nt, synthetic construct
  source 1..20: mol_type = other RNA
cagcttggccagctctgcca

SEQ ID NO: 7232 - RNA, 20 nt, synthetic construct
  source 1..20: mol_type = other RNA
ccagcttggccagctctgcc

SEQ ID NO: 7233 - RNA, 20 nt, synthetic construct
  source 1..20: mol_type = other RNA
ccccggggccctggcagagc

SEQ ID NO: 7234 - RNA, 20 nt, synthetic construct
  source 1..20: mol_type = other RNA
cctggcagagctggccaagc

SEQ ID NO: 7235 - RNA, 20 nt, synthetic construct
  source 1..20: mol_type = other RNA
gcccagctcccaggccagct

SEQ ID NO: 7236 - RNA, 20 nt, synthetic construct
  source 1..20: mol_type = other RNA
cagagctggccaagctggcc

SEQ ID NO: 7237 - RNA, 20 nt, synthetic construct
  source 1..20: mol_type = other RNA
agagctggccaagctggcct

SEQ ID NO: 7238 - RNA, 20 nt, synthetic construct
  source 1..20: mol_type = other RNA
ggccaagctggcctgggagc

SEQ ID NO: 7239 - RNA, 20 nt, synthetic construct
  source 1..20: mol_type = other RNA
atgtctgcggcccagctccc

SEQ ID NO: 7240 - RNA, 20 nt, synthetic construct
  source 1..20: mol_type = other RNA
gccaagctggcctgggagct

SEQ ID NO: 7241 - RNA, 20 nt, synthetic construct
  source 1..20: mol_type = other RNA
gtagggtactttgatgtctg

SEQ ID NO: 7242 - RNA, 20 nt, synthetic construct
  source 1..20: mol_type = other RNA
cagacatcaaagtaccctac

SEQ ID NO: 7243 - RNA, 20 nt, synthetic construct
  source 1..20: mol_type = other RNA
acatcaaagtaccctacagg

SEQ ID NO: 7244 - RNA, 20 nt, synthetic construct
  source 1..20: mol_type = other RNA
tgggaactggtcctcctgta

SEQ ID NO: 7245 - RNA, 20 nt, synthetic construct
  source 1..20: mol_type = other RNA
atgggaactggtcctcctgt

SEQ ID NO: 7246 - RNA, 20 nt, synthetic construct
  source 1..20: mol_type = other RNA
tcacgtctgcggatgggaac

SEQ ID NO: 7247 - RNA, 20 nt, synthetic construct
  source 1..20: mol_type = other RNA
aggtcctcacgtctgcggat

SEQ ID NO: 7248 - RNA, 20 nt, synthetic construct
  source 1..20: mol_type = other RNA
caggtcctcacgtctgcgga

SEQ ID NO: 7249 - RNA, 20 nt, synthetic construct
  source 1..20: mol_type = other RNA
cgcccaggtcctcacgtctg

SEQ ID NO: 7250 - RNA, 20 nt, synthetic construct
  source 1..20: mol_type = other RNA
agttcccatccgcagacgtg

SEQ ID NO: 7251 - RNA, 20 nt, synthetic construct
  source 1..20: mol_type = other RNA
catccgcagacgtgaggacc

SEQ ID NO: 7252 - RNA, 20 nt, synthetic construct
  source 1..20: mol_type = other RNA
atccgcagacgtgaggacct

SEQ ID NO: 7253 - RNA, 20 nt, synthetic construct
  source 1..20: mol_type = other RNA
agacgtgaggacctgggcga

SEQ ID NO: 7254 - RNA, 20 nt, synthetic construct
  source 1..20: mol_type = other RNA
taagcctttggccatcgccc

SEQ ID NO: 7255 - RNA, 20 nt, synthetic construct
  source 1..20: mol_type = other RNA
aggacctgggcgatggccaa

SEQ ID NO: 7256 - RNA, 20 nt, synthetic construct
  source 1..20: mol_type = other RNA
tgggtgttggactaagcctt

SEQ ID NO: 7257 - RNA, 20 nt, synthetic construct
  source 1..20: mol_type = other RNA
ctgcggcccgcggtgggtgt

SEQ ID NO: 7258 - RNA, 20 nt, synthetic construct
  source 1..20: mol_type = other RNA
gcttagtccaacacccaccg

SEQ ID NO: 7259 - RNA, 20 nt, synthetic construct
  source 1..20: mol_type = other RNA
cttagtccaacacccaccgc

SEQ ID NO: 7260 - RNA, 20 nt, synthetic construct
  source 1..20: mol_type = other RNA
cggactctgcggcccgcggt

SEQ ID NO: 7261 - RNA, 20 nt, synthetic construct
  source 1..20: mol_type = other RNA
tcggactctgcggcccgcgg

SEQ ID NO: 7262 - RNA, 20 nt, synthetic construct
  source 1..20: mol_type = other RNA
agctcggactctgcggcccg

SEQ ID NO: 7263 - RNA, 20 nt, synthetic construct
  source 1..20: mol_type = other RNA
gaaggccagctcggactctg

SEQ ID NO: 7264 - RNA, 20 nt, synthetic construct
  source 1..20: mol_type = other RNA
gcgggccgcagagtccgagc

SEQ ID NO: 7265 - RNA, 20 nt, synthetic construct
  source 1..20: mol_type = other RNA
gaagctggggaaggccagct

SEQ ID NO: 7266 - RNA, 20 nt, synthetic construct
  source 1..20: mol_type = other RNA
ttgcaggaggaagctgggga

SEQ ID NO: 7267 - RNA, 20 nt, synthetic construct
  source 1..20: mol_type = other RNA
agcattgcaggaggaagctg

SEQ ID NO: 7268 - RNA, 20 nt, synthetic construct
  source 1..20: mol_type = other RNA
aagcattgcaggaggaagct

SEQ ID NO: 7269 - RNA, 20 nt, synthetic construct
  source 1..20: mol_type = other RNA
gaagcattgcaggaggaagc

SEQ ID NO: 7270 - RNA, 20 nt, synthetic construct
  source 1..20: mol_type = other RNA
cccccaggaagcattgcagg

SEQ ID NO: 7271 - RNA, 20 nt, synthetic construct
  source 1..20: mol_type = other RNA
gggcccccaggaagcattgc

SEQ ID NO: 7272 - RNA, 20 nt, synthetic construct
  source 1..20: mol_type = other RNA
cttcctcctgcaatgcttcc

SEQ ID NO: 7273 - RNA, 20 nt, synthetic construct
  source 1..20: mol_type = other RNA
ttcctcctgcaatgcttcct

SEQ ID NO: 7274 - RNA, 20 nt, synthetic construct
  source 1..20: mol_type = other RNA
tcctcctgcaatgcttcctg

SEQ ID NO: 7275 - RNA, 20 nt, synthetic construct
  source 1..20: mol_type = other RNA
cctcctgcaatgcttcctgg

SEQ ID NO: 7276 - RNA, 20 nt, synthetic construct
  source 1..20: mol_type = other RNA
gagccagccacagggccccc

SEQ ID NO: 7277 - RNA, 20 nt, synthetic construct
  source 1..20: mol_type = other RNA
aatgcttcctgggggccctg

SEQ ID NO: 7278 - RNA, 20 nt, synthetic construct
  source 1..20: mol_type = other RNA
cttcctgggggccctgtggc

SEQ ID NO: 7279 - RNA, 20 nt, synthetic construct
  source 1..20: mol_type = other RNA
gccactcagagccagccaca

SEQ ID NO: 7280 - RNA, 20 nt, synthetic construct
  source 1..20: mol_type = other RNA
cgccactcagagccagccac

SEQ ID NO: 7281 - RNA, 20 nt, synthetic construct
  source 1..20: mol_type = other RNA
gccctgtggctggctctgag

SEQ ID NO: 7282 - RNA, 20 nt, synthetic construct
  source 1..20: mol_type = other RNA
ggctctgagtggcgaaatca

SEQ ID NO: 7283 - RNA, 20 nt, synthetic construct
  source 1..20: mol_type = other RNA
gagtggcgaaatcaaggaca

SEQ ID NO: 7284 - RNA, 20 nt, synthetic construct
  source 1..20: mol_type = other RNA
gggtcaatgctaggtactgc

SEQ ID NO: 7285 - RNA, 20 nt, synthetic construct
  source 1..20: mol_type = other RNA
ggggtcaatgctaggtactg

SEQ ID NO: 7286 - RNA, 20 nt, synthetic construct
  source 1..20: mol_type = other RNA
tcttccttggggtcaatgct

SEQ ID NO: 7287 - RNA, 20 nt, synthetic construct
  source 1..20: mol_type = other RNA
agtacctagcattgacccca

SEQ ID NO: 7288 - RNA, 20 nt, synthetic construct
  source 1..20: mol_type = other RNA
atagggcctcttcttccttg

SEQ ID NO: 7289 - RNA, 20 nt, synthetic construct
  source 1..20: mol_type = other RNA
catagggcctcttcttcctt

SEQ ID NO: 7290 - RNA, 20 nt, synthetic construct
  source 1..20: mol_type = other RNA
tcatagggcctcttcttcct

SEQ ID NO: 7291 - RNA, 20 nt, synthetic construct
  source 1..20: mol_type = other RNA
cattgaccccaaggaagaag

SEQ ID NO: 7292 - RNA, 20 nt, synthetic construct
  source 1..20: mol_type = other RNA
ccctccagccagttgtcata

SEQ ID NO: 7293 - RNA, 20 nt, synthetic construct
  source 1..20: mol_type = other RNA
gccctccagccagttgtcat

SEQ ID NO: 7294 - RNA, 20 nt, synthetic construct
  source 1..20: mol_type = other RNA
agaagaggccctatgacaac

SEQ ID NO: 7295 - RNA, 20 nt, synthetic construct
  source 1..20: mol_type = other RNA
gaggccctatgacaactggc

SEQ ID NO: 7296 - RNA, 20 nt, synthetic construct
  source 1..20: mol_type = other RNA
gccctatgacaactggctgg

SEQ ID NO: 7297 - RNA, 20 nt, synthetic construct
  source 1..20: mol_type = other RNA
ccctatgacaactggctgga

SEQ ID NO: 7298 - RNA, 20 nt, synthetic construct
  source 1..20: mol_type = other RNA
atcagcccagccagaaagcg

SEQ ID NO: 7299 - RNA, 20 nt, synthetic construct
  source 1..20: mol_type = other RNA
ggagggcgtgccacgctttc

SEQ ID NO: 7300 - RNA, 20 nt, synthetic construct
  source 1..20: mol_type = other RNA
ggcgtgccacgctttctggc

SEQ ID NO: 7301 - RNA, 20 nt, synthetic construct
  source 1..20: mol_type = other RNA
gcgtgccacgctttctggct

SEQ ID NO: 7302 - RNA, 20 nt, synthetic construct
  source 1..20: mol_type = other RNA
ccaggcagcgggcgggaggc

SEQ ID NO: 7303 - RNA, 20 nt, synthetic construct
  source 1..20: mol_type = other RNA
gctcccaggcagcgggcggg

SEQ ID NO: 7304 - RNA, 20 nt, synthetic construct
  source 1..20: mol_type = other RNA
agggctcccaggcagcgggc

SEQ ID NO: 7305 - RNA, 20 nt, synthetic construct
  source 1..20: mol_type = other RNA
tagggctcccaggcagcggg

SEQ ID NO: 7306 - RNA, 20 nt, synthetic construct
  source 1..20: mol_type = other RNA
ccagcctcccgcccgctgcc

SEQ ID NO: 7307 - RNA, 20 nt, synthetic construct
  source 1..20: mol_type = other RNA
gagtagggctcccaggcagc

SEQ ID NO: 7308 - RNA, 20 nt, synthetic construct
  source 1..20: mol_type = other RNA
cagcctcccgcccgctgcct

SEQ ID NO: 7309 - RNA, 20 nt, synthetic construct
  source 1..20: mol_type = other RNA
cgagtagggctcccaggcag

SEQ ID NO: 7310 - RNA, 20 nt, synthetic construct
  source 1..20: mol_type = other RNA
atggcccgagtagggctccc

SEQ ID NO: 7311 - RNA, 20 nt, synthetic construct
  source 1..20: mol_type = other RNA
cgctgcctgggagccctact

SEQ ID NO: 7312 - RNA, 20 nt, synthetic construct
  source 1..20: mol_type = other RNA
gctgcctgggagccctactc

SEQ ID NO: 7313 - RNA, 20 nt, synthetic construct
  source 1..20: mol_type = other RNA
agccgccgatggcccgagta

SEQ ID NO: 7314 - RNA, 20 nt, synthetic construct
  source 1..20: mol_type = other RNA
cagccgccgatggcccgagt

SEQ ID NO: 7315 - RNA, 20 nt, synthetic construct
  source 1..20: mol_type = other RNA
gggagccctactcgggccat

SEQ ID NO: 7316 - RNA, 20 nt, synthetic construct
  source 1..20: mol_type = other RNA
agccctactcgggccatcgg

SEQ ID NO: 7317 - RNA, 20 nt, synthetic construct
  source 1..20: mol_type = other RNA
tccaccgaggcagccgccga

SEQ ID NO: 7318 - RNA, 20 nt, synthetic construct
  source 1..20: mol_type = other RNA
cgggccatcggcggctgcct

SEQ ID NO: 7319 - RNA, 20 nt, synthetic construct
  source 1..20: mol_type = other RNA
gccatcggcggctgcctcgg

SEQ ID NO: 7320 - RNA, 20 nt, synthetic construct
  source 1..20: mol_type = other RNA
cttctgcttcctgtccaccg

SEQ ID NO: 7321 - RNA, 20 nt, synthetic construct
  source 1..20: mol_type = other RNA
cggcggctgcctcggtggac

SEQ ID NO: 7322 - RNA, 20 nt, synthetic construct
  source 1..20: mol_type = other RNA
ctcggtggacaggaagcaga

SEQ ID NO: 7323 - RNA, 20 nt, synthetic construct
  source 1..20: mol_type = other RNA
ggaagcagaaggtgcttgcg

SEQ ID NO: 7324 - RNA, 20 nt, synthetic construct
  source 1..20: mol_type = other RNA
tgcttgcgaggtacctgaag

SEQ ID NO: 7325 - RNA, 20 nt, synthetic construct
  source 1..20: mol_type = other RNA
tccccggctgcagccgcttc

SEQ ID NO: 7326 - RNA, 20 nt, synthetic construct
  source 1..20: mol_type = other RNA
gtacctgaagcggctgcagc

SEQ ID NO: 7327 - RNA, 20 nt, synthetic construct
  source 1..20: mol_type = other RNA
tacctgaagcggctgcagcc

SEQ ID NO: 7328 - RNA, 20 nt, synthetic construct
  source 1..20: mol_type = other RNA
acctgaagcggctgcagccg

SEQ ID NO: 7329 - RNA, 20 nt, synthetic construct
  source 1..20: mol_type = other RNA
tgccgcgcccgcagtgtccc

SEQ ID NO: 7330 - RNA, 20 nt, synthetic construct
  source 1..20: mol_type = other RNA
ggctgcagccggggacactg

SEQ ID NO: 7331 - RNA, 20 nt, synthetic construct
  source 1..20: mol_type = other RNA
gctgcagccggggacactgc

SEQ ID NO: 7332 - RNA, 20 nt, synthetic construct
  source 1..20: mol_type = other RNA
agccggggacactgcgggcg

SEQ ID NO: 7333 - RNA, 20 nt, synthetic construct
  source 1..20: mol_type = other RNA
actgcgggcgcggcagctgc

SEQ ID NO: 7334 - RNA, 20 nt, synthetic construct
  source 1..20: mol_type = other RNA
gctgctgcactgcgcccacg

SEQ ID NO: 7335 - RNA, 20 nt, synthetic construct
  source 1..20: mol_type = other RNA
tccagcctcctcggcctcgt

SEQ ID NO: 7336 - RNA, 20 nt, synthetic construct
  source 1..20: mol_type = other RNA
ttccagcctcctcggcctcg

SEQ ID NO: 7337 - RNA, 20 nt, synthetic construct
  source 1..20: mol_type = other RNA
gcactgcgcccacgaggccg

SEQ ID NO: 7338 - RNA, 20 nt, synthetic construct
  source 1..20: mol_type = other RNA
ctgcgcccacgaggccgagg

SEQ ID NO: 7339 - RNA, 20 nt, synthetic construct
  source 1..20: mol_type = other RNA
ctgccaaattccagcctcct

SEQ ID NO: 7340 - RNA, 20 nt, synthetic construct
  source 1..20: mol_type = other RNA
gcccacgaggccgaggaggc

SEQ ID NO: 7341 - RNA, 20 nt, synthetic construct
  source 1..20: mol_type = other RNA
aggccgaggaggctggaatt

SEQ ID NO: 7342 - RNA, 20 nt, synthetic construct
  source 1..20: mol_type = other RNA
ggctggaatttggcagcacg

SEQ ID NO: 7343 - RNA, 20 nt, synthetic construct
  source 1..20: mol_type = other RNA
aatttggcagcacgtggtac

SEQ ID NO: 7344 - RNA, 20 nt, synthetic construct
  source 1..20: mol_type = other RNA
cacgtggtacaggagctccc

SEQ ID NO: 7345 - RNA, 20 nt, synthetic construct
  source 1..20: mol_type = other RNA
ccagaaaagagaggcggccg

SEQ ID NO: 7346 - RNA, 20 nt, synthetic construct
  source 1..20: mol_type = other RNA
cccagaaaagagaggcggcc

SEQ ID NO: 7347 - RNA, 20 nt, synthetic construct
  source 1..20: mol_type = other RNA
gcccagaaaagagaggcggc

SEQ ID NO: 7348 - RNA, 20 nt, synthetic construct
  source 1..20: mol_type = other RNA
gggtgcccagaaaagagagg

SEQ ID NO: 7349 - RNA, 20 nt, synthetic construct
  source 1..20: mol_type = other RNA
ggcgggtgcccagaaaagag

SEQ ID NO: 7350 - RNA, 20 nt, synthetic construct
  source 1..20: mol_type = other RNA
ccccggccgcctctcttttc

SEQ ID NO: 7351 - RNA, 20 nt, synthetic construct
  source 1..20: mol_type = other RNA
cccggccgcctctcttttct

SEQ ID NO: 7352 - RNA, 20 nt, synthetic construct
  source 1..20: mol_type = other RNA
tgcatcaggaggcgtgaggc

SEQ ID NO: 7353 - RNA, 20 nt, synthetic construct
  source 1..20: mol_type = other RNA
gtgcatcaggaggcgtgagg

SEQ ID NO: 7354 - RNA, 20 nt, synthetic construct
  source 1..20: mol_type = other RNA
catgtgcatcaggaggcgtg

SEQ ID NO: 7355 - RNA, 20 nt, synthetic construct
  source 1..20: mol_type = other RNA
cccagtacatgtgcatcagg

SEQ ID NO: 7356 - RNA, 20 nt, synthetic construct
  source 1..20: mol_type = other RNA
ttgcccagtacatgtgcatc

SEQ ID NO: 7357 - RNA, 20 nt, synthetic construct
  source 1..20: mol_type = other RNA
gcctcctgatgcacatgtac

SEQ ID NO: 7358 - RNA, 20 nt, synthetic construct
  source 1..20: mol_type = other RNA
cctcctgatgcacatgtact

SEQ ID NO: 7359 - RNA, 20 nt, synthetic construct
  source 1..20: mol_type = other RNA
tgatgcacatgtactgggca

SEQ ID NO: 7360 - RNA, 20 nt, synthetic construct
  source 1..20: mol_type = other RNA
acatgtactgggcaaggcct

SEQ ID NO: 7361 - RNA, 20 nt, synthetic construct
  source 1..20: mol_type = other RNA
tgtactgggcaaggccttgg

SEQ ID NO: 7362 - RNA, 20 nt, synthetic construct
  source 1..20: mol_type = other RNA
actgggcaaggccttggagg

SEQ ID NO: 7363 - RNA, 20 nt, synthetic construct
  source 1..20: mol_type = other RNA
gtcttggcccgccgcctcca

SEQ ID NO: 7364 - RNA, 20 nt, synthetic construct
  source 1..20: mol_type = other RNA
gggcaaggccttggaggcgg

SEQ ID NO: 7365 - RNA, 20 nt, synthetic construct
  source 1..20: mol_type = other RNA
ggcaaggccttggaggcggc

SEQ ID NO: 7366 - RNA, 20 nt, synthetic construct
  source 1..20: mol_type = other RNA
ggaggtccagggagaagtct

SEQ ID NO: 7367 - RNA, 20 nt, synthetic construct
  source 1..20: mol_type = other RNA
ggcgggccaagacttctccc

SEQ ID NO: 7368 - RNA, 20 nt, synthetic construct
  source 1..20: mol_type = other RNA
gccagtgctgcggaggtcca

SEQ ID NO: 7369 - RNA, 20 nt, synthetic construct
  source 1..20: mol_type = other RNA
tgccagtgctgcggaggtcc

SEQ ID NO: 7370 - RNA, 20 nt, synthetic construct
  source 1..20: mol_type = other RNA
ggcaaatgccagtgctgcgg

SEQ ID NO: 7371 - RNA, 20 nt, synthetic construct
  source 1..20: mol_type = other RNA
tccctggacctccgcagcac

SEQ ID NO: 7372 - RNA, 20 nt, synthetic construct
  source 1..20: mol_type = other RNA
aggggcaaatgccagtgctg

SEQ ID NO: 7373 - RNA, 20 nt, synthetic construct
  source 1..20: mol_type = other RNA
agcactggcatttgcccctc

SEQ ID NO: 7374 - RNA, 20 nt, synthetic construct
  source 1..20: mol_type = other RNA
cgaggctccccaatccagag

SEQ ID NO: 7375 - RNA, 20 nt, synthetic construct
  source 1..20: mol_type = other RNA
acgaggctccccaatccaga

SEQ ID NO: 7376 - RNA, 20 nt, synthetic construct
  source 1..20: mol_type = other RNA
tggcatttgcccctctggat

SEQ ID NO: 7377 - RNA, 20 nt, synthetic construct
  source 1..20: mol_type = other RNA
cacgaggctccccaatccag

SEQ ID NO: 7378 - RNA, 20 nt, synthetic construct
  source 1..20: mol_type = other RNA
ggcatttgcccctctggatt

SEQ ID NO: 7379 - RNA, 20 nt, synthetic construct
  source 1..20: mol_type = other RNA
gcatttgcccctctggattg

SEQ ID NO: 7380 - RNA, 20 nt, synthetic construct
  source 1..20: mol_type = other RNA
ctctggattggggagcctcg

SEQ ID NO: 7381 - RNA, 20 nt, synthetic construct
  source 1..20: mol_type = other RNA
tctggattggggagcctcgt

SEQ ID NO: 7382 - RNA, 20 nt, synthetic construct
  source 1..20: mol_type = other RNA
tgacacagctgagtcccacg

SEQ ID NO: 7383 - RNA, 20 nt, synthetic construct
  source 1..20: mol_type = other RNA
tcagctgtgtcacccgtttc

SEQ ID NO: 7384 - RNA, 20 nt, synthetic construct
  source 1..20: mol_type = other RNA
cccctcaccccacctgaaac

SEQ ID NO: 7385 - RNA, 20 nt, synthetic construct
  source 1..20: mol_type = other RNA
gcccctcaccccacctgaaa

SEQ ID NO: 7386 - RNA, 20 nt, synthetic construct
  source 1..20: mol_type = other RNA
gctgtgtcacccgtttcagg

SEQ ID NO: 7387 - RNA, 20 nt, synthetic construct
  source 1..20: mol_type = other RNA
ctgtgtcacccgtttcaggt

SEQ ID NO: 7388 - RNA, 20 nt, synthetic construct
  source 1..20: mol_type = other RNA
tgtgtcacccgtttcaggtg

SEQ ID NO: 7389 - RNA, 20 nt, synthetic construct
  source 1..20: mol_type = other RNA
cacccgtttcaggtggggtg

SEQ ID NO: 7390 - RNA, 20 nt, synthetic construct
  source 1..20: mol_type = other RNA
acccgtttcaggtggggtga

SEQ ID NO: 7391 - RNA, 20 nt, synthetic construct
  source 1..20: mol_type = other RNA
cccgtttcaggtggggtgag

SEQ ID NO: 7392 - RNA, 20 nt, synthetic construct
  source 1..20: mol_type = other RNA
ttcaggtggggtgaggggct

SEQ ID NO: 7393 - RNA, 20 nt, synthetic construct
  source 1..20: mol_type = other RNA
tcaggtggggtgaggggctt

SEQ ID NO: 7394 - RNA, 20 nt, synthetic construct
  source 1..20: mol_type = other RNA
caggtggggtgaggggcttg

SEQ ID NO: 7395 - RNA, 20 nt, synthetic construct
  source 1..20: mol_type = other RNA
gggaagagacatccttgtgt

SEQ ID NO: 7396 - RNA, 20 nt, synthetic construct
  source 1..20: mol_type = other RNA
ggaagagacatccttgtgtt

SEQ ID NO: 7397 - RNA, 20 nt, synthetic construct
  source 1..20: mol_type = other RNA
cgcagttaatgcccaacaca

SEQ ID NO: 7398 - RNA, 20 nt, synthetic construct
  source 1..20: mol_type = other RNA
cttgtgttgggcattaactg

SEQ ID NO: 7399 - RNA, 20 nt, synthetic construct
  source 1..20: mol_type = other RNA
ttgggcattaactgcggtct

SEQ ID NO: 7400 - RNA, 20 nt, synthetic construct
  source 1..20: mol_type = other RNA
accccacagagcactgggct

SEQ ID NO: 7401 - RNA, 20 nt, synthetic construct
  source 1..20: mol_type = other RNA
aagagaccccacagagcact

SEQ ID NO: 7402 - RNA, 20 nt, synthetic construct
  source 1..20: mol_type = other RNA
aaagagaccccacagagcac

SEQ ID NO: 7403 - RNA, 20 nt, synthetic construct
  source 1..20: mol_type = other RNA
gtgccaagcccagtgctctg

SEQ ID NO: 7404 - RNA, 20 nt, synthetic construct
  source 1..20: mol_type = other RNA
tgccaagcccagtgctctgt

SEQ ID NO: 7405 - RNA, 20 nt, synthetic construct
  source 1..20: mol_type = other RNA
gccaagcccagtgctctgtg

SEQ ID NO: 7406 - RNA, 20 nt, synthetic construct
  source 1..20: mol_type = other RNA
cttttagtatgcagagcagc

SEQ ID NO: 7407 - RNA, 20 nt, synthetic construct
  source 1..20: mol_type = other RNA
ttttagtatgcagagcagcc

SEQ ID NO: 7408 - RNA, 20 nt, synthetic construct
  source 1..20: mol_type = other RNA
tagtatgcagagcagccggg

SEQ ID NO: 7409 - RNA, 20 nt, synthetic construct
  source 1..20: mol_type = other RNA
agtatgcagagcagccgggt

SEQ ID NO: 7410 - RNA, 20 nt, synthetic construct
  source 1..20: mol_type = other RNA
gtatgcagagcagccgggtg

SEQ ID NO: 7411 - RNA, 20 nt, synthetic construct
  source 1..20: mol_type = other RNA
agaatccattctgccccacc

SEQ ID NO: 7412 - RNA, 20 nt, synthetic construct
  source 1..20: mol_type = other RNA
agcagccgggtggggcagaa

SEQ ID NO: 7413 - RNA, 20 nt, synthetic construct
  source 1..20: mol_type = other RNA
caacatcctcatcttaaaaa

SEQ ID NO: 7414 - RNA, 20 nt, synthetic construct
  source 1..20: mol_type = other RNA
ttctctccatttttaagatg

SEQ ID NO: 7415 - RNA, 20 nt, synthetic construct
  source 1..20: mol_type = other RNA
tttttaagatgaggatgttg

SEQ ID NO: 7416 - RNA, 20 nt, synthetic construct
  source 1..20: mol_type = other RNA
gaggatgttgaggctcagag

SEQ ID NO: 7417 - RNA, 20 nt, synthetic construct
  source 1..20: mol_type = other RNA
aggatgttgaggctcagaga

SEQ ID NO: 7418 - RNA, 20 nt, synthetic construct
  source 1..20: mol_type = other RNA
ggatgttgaggctcagagag

SEQ ID NO: 7419 - RNA, 20 nt, synthetic construct
  source 1..20: mol_type = other RNA
ctcacttgctgtgtggcaag

SEQ ID NO: 7420 - RNA, 20 nt, synthetic construct
  source 1..20: mol_type = other RNA
attgcctctcacttgctgtg

SEQ ID NO: 7421 - RNA, 20 nt, synthetic construct
  source 1..20: mol_type = other RNA
cttgccacacagcaagtgag

SEQ ID NO: 7422 - RNA, 20 nt, synthetic construct
  source 1..20: mol_type = other RNA
acacagcaagtgagaggcaa

SEQ ID NO: 7423 - RNA, 20 nt, synthetic construct
  source 1..20: mol_type = other RNA
cgggccttcaaatattgact

SEQ ID NO: 7424 - RNA, 20 nt, synthetic construct
  source 1..20: mol_type = other RNA
gcgggccttcaaatattgac

SEQ ID NO: 7425 - RNA, 20 nt, synthetic construct
  source 1..20: mol_type = other RNA
ttctcccagtcaatatttga

SEQ ID NO: 7426 - RNA, 20 nt, synthetic construct
  source 1..20: mol_type = other RNA
cccagtgactggcacatggc

SEQ ID NO: 7427 - RNA, 20 nt, synthetic construct
  source 1..20: mol_type = other RNA
ccccagtgactggcacatgg

SEQ ID NO: 7428 - RNA, 20 nt, synthetic construct
  source 1..20: mol_type = other RNA
ataccccagtgactggcaca

SEQ ID NO: 7429 - RNA, 20 nt, synthetic construct
  source 1..20: mol_type = other RNA
gcccgccatgtgccagtcac

SEQ ID NO: 7430 - RNA, 20 nt, synthetic construct
  source 1..20: mol_type = other RNA
cccgccatgtgccagtcact

SEQ ID NO: 7431 - RNA, 20 nt, synthetic construct
  source 1..20: mol_type = other RNA
tctagacataccccagtgac

SEQ ID NO: 7432 - RNA, 20 nt, synthetic construct
  source 1..20: mol_type = other RNA
ccgccatgtgccagtcactg

SEQ ID NO: 7433 - RNA, 20 nt, synthetic construct
  source 1..20: mol_type = other RNA
tctagaatctgagactgacc

SEQ ID NO: 7434 - RNA, 20 nt, synthetic construct
  source 1..20: mol_type = other RNA
ctagaatctgagactgacct

SEQ ID NO: 7435 - RNA, 20 nt, synthetic construct
  source 1..20: mol_type = other RNA
aataaaacaaatttgagccc

SEQ ID NO: 7436 - RNA, 20 nt, synthetic construct
  source 1..20: mol_type = other RNA
acggtggcgtgctcaggggg

SEQ ID NO: 7437 - RNA, 20 nt, synthetic construct
  source 1..20: mol_type = other RNA
aaaacggtggcgtgctcagg

SEQ ID NO: 7438 - RNA, 20 nt, synthetic construct
  source 1..20: mol_type = other RNA
gaaaacggtggcgtgctcag

SEQ ID NO: 7439 - RNA, 20 nt, synthetic construct
  source 1..20: mol_type = other RNA
agaaaacggtggcgtgctca

SEQ ID NO: 7440 - RNA, 20 nt, synthetic construct
  source 1..20: mol_type = other RNA
aagaaaacggtggcgtgctc

SEQ ID NO: 7441 - RNA, 20 nt, synthetic construct
  source 1..20: mol_type = other RNA
ctcttagcataagaaaacgg

SEQ ID NO: 7442 - RNA, 20 nt, synthetic construct
  source 1..20: mol_type = other RNA
ttactcttagcataagaaaa

SEQ ID NO: 7443 - RNA, 20 nt, synthetic construct
  source 1..20: mol_type = other RNA
ttatgctaagagtaaagcca

SEQ ID NO: 7444 - RNA, 20 nt, synthetic construct
  source 1..20: mol_type = other RNA
gagagtccaaggggaggcca

SEQ ID NO: 7445 - RNA, 20 nt, synthetic construct
  source 1..20: mol_type = other RNA
gtaaagccatggcctcccct

SEQ ID NO: 7446 - RNA, 20 nt, synthetic construct
  source 1..20: mol_type = other RNA
gaggcagagagtccaagggg

SEQ ID NO: 7447 - RNA, 20 nt, synthetic construct
  source 1..20: mol_type = other RNA
atggaggcagagagtccaag

SEQ ID NO: 7448 - RNA, 20 nt, synthetic construct
  source 1..20: mol_type = other RNA
aatggaggcagagagtccaa

SEQ ID NO: 7449 - RNA, 20 nt, synthetic construct
  source 1..20: mol_type = other RNA
gaatggaggcagagagtcca

SEQ ID NO: 7450 - RNA, 20 nt, synthetic construct
  source 1..20: mol_type = other RNA
agtggaagaggagagaatgg

SEQ ID NO: 7451 - RNA, 20 nt, synthetic construct
  source 1..20: mol_type = other RNA
tggagtggaagaggagagaa

SEQ ID NO: 7452 - RNA, 20 nt, synthetic construct
  source 1..20: mol_type = other RNA
aatacaaaatggagtggaag

SEQ ID NO: 7453 - RNA, 20 nt, synthetic construct
  source 1..20: mol_type = other RNA
ttgctgaatacaaaatggag

SEQ ID NO: 7454 - RNA, 20 nt, synthetic construct
  source 1..20: mol_type = other RNA
tctggttgctgaatacaaaa

SEQ ID NO: 7455 - RNA, 20 nt, synthetic construct
  source 1..20: mol_type = other RNA
aagttctgagaagattggtc

SEQ ID NO: 7456 - RNA, 20 nt, synthetic construct
  source 1..20: mol_type = other RNA
gattcaagttctgagaagat

SEQ ID NO: 7457 - RNA, 20 nt, synthetic construct
  source 1..20: mol_type = other RNA
gaaggattgtaagcagggat

SEQ ID NO: 7458 - RNA, 20 nt, synthetic construct
  source 1..20: mol_type = other RNA
tgaaggattgtaagcaggga

SEQ ID NO: 7459 - RNA, 20 nt, synthetic construct
  source 1..20: mol_type = other RNA
tccctgaaggattgtaagca

SEQ ID NO: 7460 - RNA, 20 nt, synthetic construct
  source 1..20: mol_type = other RNA
gtccctgaaggattgtaagc

SEQ ID NO: 7461 - RNA, 20 nt, synthetic construct
  source 1..20: mol_type = other RNA
atccctgcttacaatccttc

SEQ ID NO: 7462 - RNA, 20 nt, synthetic construct
  source 1..20: mol_type = other RNA
tccctgcttacaatccttca

SEQ ID NO: 7463 - RNA, 20 nt, synthetic construct
  source 1..20: mol_type = other RNA
cagtggtggagtgtccctga

SEQ ID NO: 7464 - RNA, 20 nt, synthetic construct
  source 1..20: mol_type = other RNA
agccttcatcctgacagtgg

SEQ ID NO: 7465 - RNA, 20 nt, synthetic construct
  source 1..20: mol_type = other RNA
agggacactccaccactgtc

SEQ ID NO: 7466 - RNA, 20 nt, synthetic construct
  source 1..20: mol_type = other RNA
tttagccttcatcctgacag

SEQ ID NO: 7467 - RNA, 20 nt, synthetic construct
  source 1..20: mol_type = other RNA
ctccaccactgtcaggatga

SEQ ID NO: 7468 - RNA, 20 nt, synthetic construct
  source 1..20: mol_type = other RNA
gaaggctaaattccttaatt

SEQ ID NO: 7469 - RNA, 20 nt, synthetic construct
  source 1..20: mol_type = other RNA
gacttaatgaaaccaaatta

SEQ ID NO: 7470 - RNA, 20 nt, synthetic construct
  source 1..20: mol_type = other RNA
ttaatttggtttcattaagt

SEQ ID NO: 7471 - RNA, 20 nt, synthetic construct
  source 1..20: mol_type = other RNA
catttcagcttaatcgccag

SEQ ID NO: 7472 - RNA, 20 nt, synthetic construct
  source 1..20: mol_type = other RNA
gaaatatggaagcaatcctc

SEQ ID NO: 7473 - RNA, 20 nt, synthetic construct
  source 1..20: mol_type = other RNA
agtatgtttagggggaaata

SEQ ID NO: 7474 - RNA, 20 nt, synthetic construct
  source 1..20: mol_type = other RNA
ttgggtaaagtatgtttagg

SEQ ID NO: 7475 - RNA, 20 nt, synthetic construct
  source 1..20: mol_type = other RNA
cttgggtaaagtatgtttag

SEQ ID NO: 7476 - RNA, 20 nt, synthetic construct
  source 1..20: mol_type = other RNA
gcttgggtaaagtatgttta

SEQ ID NO: 7477 - RNA, 20 nt, synthetic construct
  source 1..20: mol_type = other RNA
agcttgggtaaagtatgttt

SEQ ID NO: 7478 - RNA, 20 nt, synthetic construct
  source 1..20: mol_type = other RNA
tatgtaggaccttacagctt

SEQ ID NO: 7479 - RNA, 20 nt, synthetic construct
  source 1..20: mol_type = other RNA
ttatgtaggaccttacagct

SEQ ID NO: 7480 - RNA, 20 nt, synthetic construct
  source 1..20: mol_type = other RNA
catactttacccaagctgta

SEQ ID NO: 7481 - RNA, 20 nt, synthetic construct
  source 1..20: mol_type = other RNA
aattattggcacaattatgt

SEQ ID NO: 7482 - RNA, 20 nt, synthetic construct
  source 1..20: mol_type = other RNA
gaagctcactgctaaattat

SEQ ID NO: 7483 - RNA, 20 nt, synthetic construct
  source 1..20: mol_type = other RNA
taatttagcagtgagcttcc

SEQ ID NO: 7484 - RNA, 20 nt, synthetic construct
  source 1..20: mol_type = other RNA
ccctttttgcttcggctacc

SEQ ID NO: 7485 - RNA, 20 nt, synthetic construct
  source 1..20: mol_type = other RNA
ttttctttccctttttgctt

SEQ ID NO: 7486 - RNA, 20 nt, synthetic construct
  source 1..20: mol_type = other RNA
tcctggtagccgaagcaaaa

SEQ ID NO: 7487 - RNA, 20 nt, synthetic construct
  source 1..20: mol_type = other RNA
cctggtagccgaagcaaaaa

SEQ ID NO: 7488 - RNA, 20 nt, synthetic construct
  source 1..20: mol_type = other RNA
ctttctcacaactcacacag

SEQ ID NO: 7489 - RNA, 20 nt, synthetic construct
  source 1..20: mol_type = other RNA
tgtgtgagttgtgagaaagt

SEQ ID NO: 7490 - RNA, 20 nt, synthetic construct
  source 1..20: mol_type = other RNA
gagaaagtaggaatcaataa

SEQ ID NO: 7491 - RNA, 20 nt, synthetic construct
  source 1..20: mol_type = other RNA
aagtaggaatcaataaaggc

SEQ ID NO: 7492 - RNA, 20 nt, synthetic construct
  source 1..20: mol_type = other RNA
ggaatcaataaaggctggag

SEQ ID NO: 7493 - RNA, 20 nt, synthetic construct
  source 1..20: mol_type = other RNA
aataaaggctggagtggtca

SEQ ID NO: 7494 - RNA, 20 nt, synthetic construct
  source 1..20: mol_type = other RNA
aaggctggagtggtcatgga

SEQ ID NO: 7495 - RNA, 20 nt, synthetic construct
  source 1..20: mol_type = other RNA
agtggtcatggaaggctttc

SEQ ID NO: 7496 - RNA, 20 nt, synthetic construct
  source 1..20: mol_type = other RNA
gtggtcatggaaggctttct

SEQ ID NO: 7497 - RNA, 20 nt, synthetic construct
  source 1..20: mol_type = other RNA
catggaaggctttctgggaa

SEQ ID NO: 7498 - RNA, 20 nt, synthetic construct
  source 1..20: mol_type = other RNA
aggctttctgggaaaggtag

SEQ ID NO: 7499 - RNA, 20 nt, synthetic construct
  source 1..20: mol_type = other RNA
gaaaggtagaggttgagcta

SEQ ID NO: 7500 - RNA, 20 nt, synthetic construct
  source 1..20: mol_type = other RNA
aggaaagaaagtattttaat

SEQ ID NO: 7501 - RNA, 20 nt, synthetic construct
  source 1..20: mol_type = other RNA
aagaaagtattttaataggt

SEQ ID NO: 7502 - RNA, 20 nt, synthetic construct
  source 1..20: mol_type = other RNA
aaagtattttaataggtagg

SEQ ID NO: 7503 - RNA, 20 nt, synthetic construct
  source 1..20: mol_type = other RNA
ataggtaggaggacccttca

SEQ ID NO: 7504 - RNA, 20 nt, synthetic construct
  source 1..20: mol_type = other RNA
tggaagggcagctccatgaa

SEQ ID NO: 7505 - RNA, 20 nt, synthetic construct
  source 1..20: mol_type = other RNA
atggaagggcagctccatga

SEQ ID NO: 7506 - RNA, 20 nt, synthetic construct
  source 1..20: mol_type = other RNA
caggctagaccttaatggaa

SEQ ID NO: 7507 - RNA, 20 nt, synthetic construct
  source 1..20: mol_type = other RNA
ccaggctagaccttaatgga

SEQ ID NO: 7508 - RNA, 20 nt, synthetic construct
  source 1..20: mol_type = other RNA
atggagctgcccttccatta

SEQ ID NO: 7509 - RNA, 20 nt, synthetic construct
  source 1..20: mol_type = other RNA
gtgaccaggctagaccttaa

SEQ ID NO: 7510 - RNA, 20 nt, synthetic construct
  source 1..20: mol_type = other RNA
ccttccattaaggtctagcc

SEQ ID NO: 7511 - RNA, 20 nt, synthetic construct
  source 1..20: mol_type = other RNA
cagacccaggcacggtgacc

SEQ ID NO: 7512 - RNA, 20 nt, synthetic construct
  source 1..20: mol_type = other RNA
tctagcctggtcaccgtgcc

SEQ ID NO: 7513 - RNA, 20 nt, synthetic construct
  source 1..20: mol_type = other RNA
ctagcctggtcaccgtgcct

SEQ ID NO: 7514 - RNA, 20 nt, synthetic construct
  source 1..20: mol_type = other RNA
gagggcctcagacccaggca

SEQ ID NO: 7515 - RNA, 20 nt, synthetic construct
  source 1..20: mol_type = other RNA
ggagggagggcctcagaccc

SEQ ID NO: 7516 - RNA, 20 nt, synthetic construct
  source 1..20: mol_type = other RNA
ggtcaccgtgcctgggtctg

SEQ ID NO: 7517 - RNA, 20 nt, synthetic construct
  source 1..20: mol_type = other RNA
aaggcagccctgtggaggga

SEQ ID NO: 7518 - RNA, 20 nt, synthetic construct
  source 1..20: mol_type = other RNA
caaggcagccctgtggaggg

SEQ ID NO: 7519 - RNA, 20 nt, synthetic construct
  source 1..20: mol_type = other RNA
gtctgaggccctccctccac

SEQ ID NO: 7520 - RNA, 20 nt, synthetic construct
  source 1..20: mol_type = other RNA
tctgaggccctccctccaca

SEQ ID NO: 7521 - RNA, 20 nt, synthetic construct
  source 1..20: mol_type = other RNA
gctcaaggcagccctgtgga

SEQ ID NO: 7522 - RNA, 20 nt, synthetic construct
  source 1..20: mol_type = other RNA
cgctcaaggcagccctgtgg

SEQ ID NO: 7523 - RNA, 20 nt, synthetic construct
  source 1..20: mol_type = other RNA
tgtcgctcaaggcagccctg

SEQ ID NO: 7524 - RNA, 20 nt, synthetic construct
  source 1..20: mol_type = other RNA
cagcgccaccgtgtcgctca

SEQ ID NO: 7525 - RNA, 20 nt, synthetic construct
  source 1..20: mol_type = other RNA
cagggctgccttgagcgaca

SEQ ID NO: 7526 - RNA, 20 nt, synthetic construct
  source 1..20: mol_type = other RNA
ggctgccttgagcgacacgg

SEQ ID NO: 7527 - RNA, 20 nt, synthetic construct
  source 1..20: mol_type = other RNA
tgagcgacacggtggcgctg

SEQ ID NO: 7528 - RNA, 20 nt, synthetic construct
  source 1..20: mol_type = other RNA
gagcgacacggtggcgctgt

SEQ ID NO: 7529 - RNA, 20 nt, synthetic construct
  source 1..20: mol_type = other RNA
ggtctccccatgctgctgca

SEQ ID NO: 7530 - RNA, 20 nt, synthetic construct
  source 1..20: mol_type = other RNA
tggtctccccatgctgctgc

SEQ ID NO: 7531 - RNA, 20 nt, synthetic construct
  source 1..20: mol_type = other RNA
tgggagtccctgcagcagca

SEQ ID NO: 7532 - RNA, 20 nt, synthetic construct
  source 1..20: mol_type = other RNA
gggagtccctgcagcagcat

SEQ ID NO: 7533 - RNA, 20 nt, synthetic construct
  source 1..20: mol_type = other RNA
ggagtccctgcagcagcatg

SEQ ID NO: 7534 - RNA, 20 nt, synthetic construct
  source 1..20: mol_type = other RNA
ctctgctgcctgaagtagct

SEQ ID NO: 7535 - RNA, 20 nt, synthetic construct
  source 1..20: mol_type = other RNA
tggggagaccaagctacttc

SEQ ID NO: 7536 - RNA, 20 nt, synthetic construct
  source 1..20: mol_type = other RNA
caagctacttcaggcagcag

SEQ ID NO: 7537 - RNA, 20 nt, synthetic construct
  source 1..20: mol_type = other RNA
cttggctttgaaaggctcga

SEQ ID NO: 7538 - RNA, 20 nt, synthetic construct
  source 1..20: mol_type = other RNA
ttcagggacttggctttgaa

SEQ ID NO: 7539 - RNA, 20 nt, synthetic construct
  source 1..20: mol_type = other RNA
ttccacatccttcagggact

SEQ ID NO: 7540 - RNA, 20 nt, synthetic construct
  source 1..20: mol_type = other RNA
tttcaaagccaagtccctga

SEQ ID NO: 7541 - RNA, 20 nt, synthetic construct
  source 1..20: mol_type = other RNA
caggtcttccacatccttca

SEQ ID NO: 7542 - RNA, 20 nt, synthetic construct
  source 1..20: mol_type = other RNA
ccaggtcttccacatccttc

SEQ ID NO: 7543 - RNA, 20 nt, synthetic construct
  source 1..20: mol_type = other RNA
agccaagtccctgaaggatg

SEQ ID NO: 7544 - RNA, 20 nt, synthetic construct
  source 1..20: mol_type = other RNA
cctgaaggatgtggaagacc

SEQ ID NO: 7545 - RNA, 20 nt, synthetic construct
  source 1..20: mol_type = other RNA
ctgaaggatgtggaagacct

SEQ ID NO: 7546 - RNA, 20 nt, synthetic construct
  source 1..20: mol_type = other RNA
gagtctgcacaagctttccc

SEQ ID NO: 7547 - RNA, 20 nt, synthetic construct
  source 1..20: mol_type = other RNA
gaaagcttgtgcagactcag

SEQ ID NO: 7548 - RNA, 20 nt, synthetic construct
  source 1..20: mol_type = other RNA
tgtgcagactcagaggtgag

SEQ ID NO: 7549 - RNA, 20 nt, synthetic construct
  source 1..20: mol_type = other RNA
agactcagaggtgagaggag

SEQ ID NO: 7550 - RNA, 20 nt, synthetic construct
  source 1..20: mol_type = other RNA
ctcagaggtgagaggagagg

SEQ ID NO: 7551 - RNA, 20 nt, synthetic construct
  source 1..20: mol_type = other RNA
gaggtgagaggagaggcgga

SEQ ID NO: 7552 - RNA, 20 nt, synthetic construct
  source 1..20: mol_type = other RNA
aggtgagaggagaggcggat

SEQ ID NO: 7553 - RNA, 20 nt, synthetic construct
  source 1..20: mol_type = other RNA
tgagaggagaggcggatggg

SEQ ID NO: 7554 - RNA, 20 nt, synthetic construct
  source 1..20: mol_type = other RNA
gaggagaggcggatgggagg

SEQ ID NO: 7555 - RNA, 20 nt, synthetic construct
  source 1..20: mol_type = other RNA
ggaggtggttcacgccatgc

SEQ ID NO: 7556 - RNA, 20 nt, synthetic construct
  source 1..20: mol_type = other RNA
ctacatgtcctcaacctgca

SEQ ID NO: 7557 - RNA, 20 nt, synthetic construct
  source 1..20: mol_type = other RNA
ggttcacgccatgcaggttg

SEQ ID NO: 7558 - RNA, 20 nt, synthetic construct
  source 1..20: mol_type = other RNA
catgcaggttgaggacatgt

SEQ ID NO: 7559 - RNA, 20 nt, synthetic construct
  source 1..20: mol_type = other RNA
cccatgacaaacttgagaat

SEQ ID NO: 7560 - RNA, 20 nt, synthetic construct
  source 1..20: mol_type = other RNA
gcccatgacaaacttgagaa

SEQ ID NO: 7561 - RNA, 20 nt, synthetic construct
  source 1..20: mol_type = other RNA
acccattctcaagtttgtca

SEQ ID NO: 7562 - RNA, 20 nt, synthetic construct
  source 1..20: mol_type = other RNA
cccattctcaagtttgtcat

SEQ ID NO: 7563 - RNA, 20 nt, synthetic construct
  source 1..20: mol_type = other RNA
tcccagaggacagggggcac

SEQ ID NO: 7564 - RNA, 20 nt, synthetic construct
  source 1..20: mol_type = other RNA
ggggtgtcccagaggacagg

SEQ ID NO: 7565 - RNA, 20 nt, synthetic construct
  source 1..20: mol_type = other RNA
tggggtgtcccagaggacag

SEQ ID NO: 7566 - RNA, 20 nt, synthetic construct
  source 1..20: mol_type = other RNA
atggggtgtcccagaggaca

SEQ ID NO: 7567 - RNA, 20 nt, synthetic construct
  source 1..20: mol_type = other RNA
ttccagtgccccctgtcctc

SEQ ID NO: 7568 - RNA, 20 nt, synthetic construct
  source 1..20: mol_type = other RNA
catggggtgtcccagaggac

SEQ ID NO: 7569 - RNA, 20 nt, synthetic construct
  source 1..20: mol_type = other RNA
tccagtgccccctgtcctct

SEQ ID NO: 7570 - RNA, 20 nt, synthetic construct
  source 1..20: mol_type = other RNA
gagggcatggggtgtcccag

SEQ ID NO: 7571 - RNA, 20 nt, synthetic construct
  source 1..20: mol_type = other RNA
ttgcccagaaagagggcatg

SEQ ID NO: 7572 - RNA, 20 nt, synthetic construct
  source 1..20: mol_type = other RNA
attgcccagaaagagggcat

SEQ ID NO: 7573 - RNA, 20 nt, synthetic construct
  source 1..20: mol_type = other RNA
cattgcccagaaagagggca

SEQ ID NO: 7574 - RNA, 20 nt, synthetic construct
  source 1..20: mol_type = other RNA
gacaccccatgccctctttc

SEQ ID NO: 7575 - RNA, 20 nt, synthetic construct
  source 1..20: mol_type = other RNA
ttagccattgcccagaaaga

SEQ ID NO: 7576 - RNA, 20 nt, synthetic construct
  source 1..20: mol_type = other RNA
acaccccatgccctctttct

SEQ ID NO: 7577 - RNA, 20 nt, synthetic construct
  source 1..20: mol_type = other RNA
gttagccattgcccagaaag

SEQ ID NO: 7578 - RNA, 20 nt, synthetic construct
  source 1..20: mol_type = other RNA
catgccctctttctgggcaa

SEQ ID NO: 7579 - RNA, 20 nt, synthetic construct
  source 1..20: mol_type = other RNA
gcgagtgcagtgagagactc

SEQ ID NO: 7580 - RNA, 20 nt, synthetic construct
  source 1..20: mol_type = other RNA
tctcactgcactcgctgccc

SEQ ID NO: 7581 - RNA, 20 nt, synthetic construct
  source 1..20: mol_type = other RNA
cactgcactcgctgcccagg

SEQ ID NO: 7582 - RNA, 20 nt, synthetic construct
  source 1..20: mol_type = other RNA
caattctagaggctccgcct

SEQ ID NO: 7583 - RNA, 20 nt, synthetic construct
  source 1..20: mol_type = other RNA
tcaattctagaggctccgcc

SEQ ID NO: 7584 - RNA, 20 nt, synthetic construct
  source 1..20: mol_type = other RNA
agcaaagttttcaattctag

SEQ ID NO: 7585 - RNA, 20 nt, synthetic construct
  source 1..20: mol_type = other RNA
agacttgggcacatgatggc

SEQ ID NO: 7586 - RNA, 20 nt, synthetic construct
  source 1..20: mol_type = other RNA
gctaagacttgggcacatga

SEQ ID NO: 7587 - RNA, 20 nt, synthetic construct
  source 1..20: mol_type = other RNA
catggctttagctaagactt

SEQ ID NO: 7588 - RNA, 20 nt, synthetic construct
  source 1..20: mol_type = other RNA
ccatggctttagctaagact

SEQ ID NO: 7589 - RNA, 20 nt, synthetic construct
  source 1..20: mol_type = other RNA
ccaagtcttagctaaagcca

SEQ ID NO: 7590 - RNA, 20 nt, synthetic construct
  source 1..20: mol_type = other RNA
agaaggggagaggttctcca

SEQ ID NO: 7591 - RNA, 20 nt, synthetic construct
  source 1..20: mol_type = other RNA
gttaactcctagaaggggag

SEQ ID NO: 7592 - RNA, 20 nt, synthetic construct
  source 1..20: mol_type = other RNA
tggagaacctctccccttct

SEQ ID NO: 7593 - RNA, 20 nt, synthetic construct
  source 1..20: mol_type = other RNA
tccttgttaactcctagaag

SEQ ID NO: 7594 - RNA, 20 nt, synthetic construct
  source 1..20: mol_type = other RNA
atccttgttaactcctagaa

SEQ ID NO: 7595 - RNA, 20 nt, synthetic construct
  source 1..20: mol_type = other RNA
catccttgttaactcctaga

SEQ ID NO: 7596 - RNA, 20 nt, synthetic construct
  source 1..20: mol_type = other RNA
tccccttctaggagttaaca

SEQ ID NO: 7597 - RNA, 20 nt, synthetic construct
  source 1..20: mol_type = other RNA
cttctgttactaggtgcaca

SEQ ID NO: 7598 - RNA, 20 nt, synthetic construct
  source 1..20: mol_type = other RNA
taggtgtcacttctgttact

SEQ ID NO: 7599 - RNA, 20 nt, synthetic construct
  source 1..20: mol_type = other RNA
atgcctcaaagggtggcagt

SEQ ID NO: 7600 - RNA, 20 nt, synthetic construct
  source 1..20: mol_type = other RNA
gtcctaaatgcctcaaaggg

SEQ ID NO: 7601 - RNA, 20 nt, synthetic construct
  source 1..20: mol_type = other RNA
acacctactgccaccctttg

SEQ ID NO: 7602 - RNA, 20 nt, synthetic construct
  source 1..20: mol_type = other RNA
gttgtcctaaatgcctcaaa

SEQ ID NO: 7603 - RNA, 20 nt, synthetic construct
  source 1..20: mol_type = other RNA
agttgtcctaaatgcctcaa

SEQ ID NO: 7604 - RNA, 20 nt, synthetic construct
  source 1..20: mol_type = other RNA
tgccaccctttgaggcattt

SEQ ID NO: 7605 - RNA, 20 nt, synthetic construct
  source 1..20: mol_type = other RNA
gctctgccgtctataaattt

SEQ ID NO: 7606 - RNA, 20 nt, synthetic construct
  source 1..20: mol_type = other RNA
agctctgccgtctataaatt

SEQ ID NO: 7607 - RNA, 20 nt, synthetic construct
  source 1..20: mol_type = other RNA
tgttgtcccaaatttataga

SEQ ID NO: 7608 - RNA, 20 nt, synthetic construct
  source 1..20: mol_type = other RNA
atttatagacggcagagcta

SEQ ID NO: 7609 - RNA, 20 nt, synthetic construct
  source 1..20: mol_type = other RNA
cggcagagctaaggtccaga

SEQ ID NO: 7610 - RNA, 20 nt, synthetic construct
  source 1..20: mol_type = other RNA
atcaagttttgtctgccttc

SEQ ID NO: 7611 - RNA, 20 nt, synthetic construct
  source 1..20: mol_type = other RNA
gctcaaacaatgtgtgatga

SEQ ID NO: 7612 - RNA, 20 nt, synthetic construct
  source 1..20: mol_type = other RNA
tatcccagacagcacttaag

SEQ ID NO: 7613 - RNA, 20 nt, synthetic construct
  source 1..20: mol_type = other RNA
agcgcctcttaagtgctgtc

SEQ ID NO: 7614 - RNA, 20 nt, synthetic construct
  source 1..20: mol_type = other RNA
gcgcctcttaagtgctgtct

SEQ ID NO: 7615 - RNA, 20 nt, synthetic construct
  source 1..20: mol_type = other RNA
tcttaagtgctgtctgggat

SEQ ID NO: 7616 - RNA, 20 nt, synthetic construct
  source 1..20: mol_type = other RNA
gtgctgtctgggataggtac

SEQ ID NO: 7617 - RNA, 20 nt, synthetic construct
  source 1..20: mol_type = other RNA
actggtaagtgcctaatctg

SEQ ID NO: 7618 - RNA, 20 nt, synthetic construct
  source 1..20: mol_type = other RNA
atggaaatgagcctcagatt

SEQ ID NO: 7619 - RNA, 20 nt, synthetic construct
  source 1..20: mol_type = other RNA
tctcaggactgtatctttca

SEQ ID NO: 7620 - RNA, 20 nt, synthetic construct
  source 1..20: mol_type = other RNA
aaataaaaataaaagatctc

SEQ ID NO: 7621 - RNA, 20 nt, synthetic construct
  source 1..20: mol_type = other RNA
ttttattatttcttaaagac

SEQ ID NO: 7622 - RNA, 20 nt, synthetic construct
  source 1..20: mol_type = other RNA
tttattatttcttaaagaca

SEQ ID NO: 7623 - RNA, 20 nt, synthetic construct
  source 1..20: mol_type = other RNA
agggtctcgctgtgtctacc

SEQ ID NO: 7624 - RNA, 20 nt, synthetic construct
  source 1..20: mol_type = other RNA
cgcactactgtattctagcc

SEQ ID NO: 7625 - RNA, 20 nt, synthetic construct
  source 1..20: mol_type = other RNA
atcatagcttactgtagctt

SEQ ID NO: 7626 - RNA, 20 nt, synthetic construct
  source 1..20: mol_type = other RNA
caggaggatcgcttgagctc

SEQ ID NO: 7627 - RNA, 20 nt, synthetic construct
  source 1..20: mol_type = other RNA
acttgggaggctgaggcagg

SEQ ID NO: 7628 - RNA, 20 nt, synthetic construct
  source 1..20: mol_type = other RNA
gctacttgggaggctgaggc

SEQ ID NO: 7629 - RNA, 20 nt, synthetic construct
  source 1..20: mol_type = other RNA
cccagctacttgggaggctg

SEQ ID NO: 7630 - RNA, 20 nt, synthetic construct
  source 1..20: mol_type = other RNA
tataatcccagctacttggg

SEQ ID NO: 7631 - RNA, 20 nt, synthetic construct
  source 1..20: mol_type = other RNA
acctataatcccagctactt

SEQ ID NO: 7632 - RNA, 20 nt, synthetic construct
  source 1..20: mol_type = other RNA
gcctcagcctcccaagtagc

SEQ ID NO: 7633 - RNA, 20 nt, synthetic construct
  source 1..20: mol_type = other RNA
cacctataatcccagctact

SEQ ID NO: 7634 - RNA, 20 nt, synthetic construct
  source 1..20: mol_type = other RNA
cctcagcctcccaagtagct

SEQ ID NO: 7635 - RNA, 20 nt, synthetic construct
  source 1..20: mol_type = other RNA
tcccaagtagctgggattat

SEQ ID NO: 7636 - RNA, 20 nt, synthetic construct
  source 1..20: mol_type = other RNA
ataggtgcacgtcatcacac

SEQ ID NO: 7637 - RNA, 20 nt, synthetic construct
  source 1..20: mol_type = other RNA
caaaaacttaaaaaatcatc

SEQ ID NO: 7638 - RNA, 20 nt, synthetic construct
  source 1..20: mol_type = other RNA
ttttaagtttttgtagacac

SEQ ID NO: 7639 - RNA, 20 nt, synthetic construct
  source 1..20: mol_type = other RNA
tttaagtttttgtagacaca

SEQ ID NO: 7640 - RNA, 20 nt, synthetic construct
  source 1..20: mol_type = other RNA
gggatcttgctatgttgccc

SEQ ID NO: 7641 - RNA, 20 nt, synthetic construct
  source 1..20: mol_type = other RNA
tcttgctatgttgcccaggc

SEQ ID NO: 7642 - RNA, 20 nt, synthetic construct
  source 1..20: mol_type = other RNA
caggagttcaagaccagcct

SEQ ID NO: 7643 - RNA, 20 nt, synthetic construct
  source 1..20: mol_type = other RNA
ccaggagttcaagaccagcc

SEQ ID NO: 7644 - RNA, 20 nt, synthetic construct
  source 1..20: mol_type = other RNA
ccaggctggtcttgaactcc

SEQ ID NO: 7645 - RNA, 20 nt, synthetic construct
  source 1..20: mol_type = other RNA
caggaggattgcttgaggcc

SEQ ID NO: 7646 - RNA, 20 nt, synthetic construct
  source 1..20: mol_type = other RNA
tgaggcaggaggattgcttg

SEQ ID NO: 7647 - RNA, 20 nt, synthetic construct
  source 1..20: mol_type = other RNA
ctttgggaggctgaggcagg

SEQ ID NO: 7648 - RNA, 20 nt, synthetic construct
  source 1..20: mol_type = other RNA
gcactttgggaggctgaggc

SEQ ID NO: 7649 - RNA, 20 nt, synthetic construct
  source 1..20: mol_type = other RNA
cccagcactttgggaggctg

SEQ ID NO: 7650 - RNA, 20 nt, synthetic construct
  source 1..20: mol_type = other RNA
tgtagtcccagcactttggg

SEQ ID NO: 7651 - RNA, 20 nt, synthetic construct
  source 1..20: mol_type = other RNA
gactgtagtcccagcacttt

SEQ ID NO: 7652 - RNA, 20 nt, synthetic construct
  source 1..20: mol_type = other RNA
gcctcagcctcccaaagtgc

SEQ ID NO: 7653 - RNA, 20 nt, synthetic construct
  source 1..20: mol_type = other RNA
tgactgtagtcccagcactt

SEQ ID NO: 7654 - RNA, 20 nt, synthetic construct
  source 1..20: mol_type = other RNA
cctcagcctcccaaagtgct

SEQ ID NO: 7655 - RNA, 20 nt, synthetic construct
  source 1..20: mol_type = other RNA
gtgctgggactacagtcacg

SEQ ID NO: 7656 - RNA, 20 nt, synthetic construct
  source 1..20: mol_type = other RNA
aaaaaagatctgtctgggtg

SEQ ID NO: 7657 - RNA, 20 nt, synthetic construct
  source 1..20: mol_type = other RNA
ttaaaaaaaaagatctgtct

SEQ ID NO: 7658 - RNA, 20 nt, synthetic construct
  source 1..20: mol_type = other RNA
cttaaaaaaaaagatctgtc

SEQ ID NO: 7659 - RNA, 20 nt, synthetic construct
  source 1..20: mol_type = other RNA
gacagatctttttttttaag

SEQ ID NO: 7660 - RNA, 20 nt, synthetic construct
  source 1..20: mol_type = other RNA
acagatctttttttttaaga

SEQ ID NO: 7661 - RNA, 20 nt, synthetic construct
  source 1..20: mol_type = other RNA
cagatctttttttttaagag

SEQ ID NO: 7662 - RNA, 20 nt, synthetic construct
  source 1..20: mol_type = other RNA
agatctttttttttaagagg

SEQ ID NO: 7663 - RNA, 20 nt, synthetic construct
  source 1..20: mol_type = other RNA
gggggacaacagttgcccca

SEQ ID NO: 7664 - RNA, 20 nt, synthetic construct
  source 1..20: mol_type = other RNA
cagggggattgctttccttg

SEQ ID NO: 7665 - RNA, 20 nt, synthetic construct
  source 1..20: mol_type = other RNA
ccagggggattgctttcctt

SEQ ID NO: 7666 - RNA, 20 nt, synthetic construct
  source 1..20: mol_type = other RNA
cccagggggattgctttcct

SEQ ID NO: 7667 - RNA, 20 nt, synthetic construct
  source 1..20: mol_type = other RNA
cccaaggaaagcaatccccc

SEQ ID NO: 7668 - RNA, 20 nt, synthetic construct
  source 1..20: mol_type = other RNA
ccaaggaaagcaatccccct

SEQ ID NO: 7669 - RNA, 20 nt, synthetic construct
  source 1..20: mol_type = other RNA
caaggaaagcaatccccctg

SEQ ID NO: 7670 - RNA, 20 nt, synthetic construct
  source 1..20: mol_type = other RNA
agtgccccaaattccccagg

SEQ ID NO: 7671 - RNA, 20 nt, synthetic construct
  source 1..20: mol_type = other RNA
cagtgccccaaattccccag

SEQ ID NO: 7672 - RNA, 20 nt, synthetic construct
  source 1..20: mol_type = other RNA
ccagtgccccaaattcccca

SEQ ID NO: 7673 - RNA, 20 nt, synthetic construct
  source 1..20: mol_type = other RNA
cccagtgccccaaattcccc

SEQ ID NO: 7674 - RNA, 20 nt, synthetic construct
  source 1..20: mol_type = other RNA
agcaatccccctggggaatt

SEQ ID NO: 7675 - RNA, 20 nt, synthetic construct
  source 1..20: mol_type = other RNA
gcaatccccctggggaattt

SEQ ID NO: 7676 - RNA, 20 nt, synthetic construct
  source 1..20: mol_type = other RNA
caatccccctggggaatttg

SEQ ID NO: 7677 - RNA, 20 nt, synthetic construct
  source 1..20: mol_type = other RNA
ccctggggaatttggggcac

SEQ ID NO: 7678 - RNA, 20 nt, synthetic construct
  source 1..20: mol_type = other RNA
cctggggaatttggggcact

SEQ ID NO: 7679 - RNA, 20 nt, synthetic construct
  source 1..20: mol_type = other RNA
ctggggaatttggggcactg

SEQ ID NO: 7680 - RNA, 20 nt, synthetic construct
  source 1..20: mol_type = other RNA
gggcactggggcagccatca

SEQ ID NO: 7681 - RNA, 20 nt, synthetic construct
  source 1..20: mol_type = other RNA
ggcactggggcagccatcat

SEQ ID NO: 7682 - RNA, 20 nt, synthetic construct
  source 1..20: mol_type = other RNA
cttacccatgggtcccatga

SEQ ID NO: 7683 - RNA, 20 nt, synthetic construct
  source 1..20: mol_type = other RNA
ggcagccatcatgggaccca

SEQ ID NO: 7684 - RNA, 20 nt, synthetic construct
  source 1..20: mol_type = other RNA
gcagccatcatgggacccat

SEQ ID NO: 7685 - RNA, 20 nt, synthetic construct
  source 1..20: mol_type = other RNA
gtcactgagcccttacccat

SEQ ID NO: 7686 - RNA, 20 nt, synthetic construct
  source 1..20: mol_type = other RNA
catcatgggacccatgggta

SEQ ID NO: 7687 - RNA, 20 nt, synthetic construct
  source 1..20: mol_type = other RNA
tgtcactgagcccttaccca

SEQ ID NO: 7688 - RNA, 20 nt, synthetic construct
  source 1..20: mol_type = other RNA
atcatgggacccatgggtaa

SEQ ID NO: 7689 - RNA, 20 nt, synthetic construct
  source 1..20: mol_type = other RNA
caggcaatgttagggggagc

SEQ ID NO: 7690 - RNA, 20 nt, synthetic construct
  source 1..20: mol_type = other RNA
agagaacaggcaatgttagg

SEQ ID NO: 7691 - RNA, 20 nt, synthetic construct
  source 1..20: mol_type = other RNA
gagagaacaggcaatgttag

SEQ ID NO: 7692 - RNA, 20 nt, synthetic construct
  source 1..20: mol_type = other RNA
ggagagaacaggcaatgtta

SEQ ID NO: 7693 - RNA, 20 nt, synthetic construct
  source 1..20: mol_type = other RNA
tggagagaacaggcaatgtt

SEQ ID NO: 7694 - RNA, 20 nt, synthetic construct
  source 1..20: mol_type = other RNA
cttctcgtcctggagagaac

SEQ ID NO: 7695 - RNA, 20 nt, synthetic construct
  source 1..20: mol_type = other RNA
taacattgcctgttctctcc

SEQ ID NO: 7696 - RNA, 20 nt, synthetic construct
  source 1..20: mol_type = other RNA
ttccgaggaacttctcgtcc

SEQ ID NO: 7697 - RNA, 20 nt, synthetic construct
  source 1..20: mol_type = other RNA
ctccaggacgagaagttcct

SEQ ID NO: 7698 - RNA, 20 nt, synthetic construct
  source 1..20: mol_type = other RNA
ctccccagctgtgtcttccg

SEQ ID NO: 7699 - RNA, 20 nt, synthetic construct
  source 1..20: mol_type = other RNA
agttcctcggaagacacagc

SEQ ID NO: 7700 - RNA, 20 nt, synthetic construct
  source 1..20: mol_type = other RNA
gttcctcggaagacacagct

SEQ ID NO: 7701 - RNA, 20 nt, synthetic construct
  source 1..20: mol_type = other RNA
ttcctcggaagacacagctg

SEQ ID NO: 7702 - RNA, 20 nt, synthetic construct
  source 1..20: mol_type = other RNA
tctttaggtcccgaacagca

SEQ ID NO: 7703 - RNA, 20 nt, synthetic construct
  source 1..20: mol_type = other RNA
ctggggagctccctgctgtt

SEQ ID NO: 7704 - RNA, 20 nt, synthetic construct
  source 1..20: mol_type = other RNA
ttctttaggtcccgaacagc

SEQ ID NO: 7705 - RNA, 20 nt, synthetic construct
  source 1..20: mol_type = other RNA
tggggagctccctgctgttc

SEQ ID NO: 7706 - RNA, 20 nt, synthetic construct
  source 1..20: mol_type = other RNA
acgcaaactccagtttcttt

SEQ ID NO: 7707 - RNA, 20 nt, synthetic construct
  source 1..20: mol_type = other RNA
tgttcgggacctaaagaaac

SEQ ID NO: 7708 - RNA, 20 nt, synthetic construct
  source 1..20: mol_type = other RNA
actggagtttgcgtaagcaa

SEQ ID NO: 7709 - RNA, 20 nt, synthetic construct
  source 1..20: mol_type = other RNA
ctggagtttgcgtaagcaaa

SEQ ID NO: 7710 - RNA, 20 nt, synthetic construct
  source 1..20: mol_type = other RNA
tggagtttgcgtaagcaaag

SEQ ID NO: 7711 - RNA, 20 nt, synthetic construct
  source 1..20: mol_type = other RNA
agtttgcgtaagcaaagggg

SEQ ID NO: 7712 - RNA, 20 nt, synthetic construct
  source 1..20: mol_type = other RNA
caaaggggtggattgtcttg

SEQ ID NO: 7713 - RNA, 20 nt, synthetic construct
  source 1..20: mol_type = other RNA
aaaggggtggattgtcttgt

SEQ ID NO: 7714 - RNA, 20 nt, synthetic construct
  source 1..20: mol_type = other RNA
ttgtcttgtgggtctgcgca

SEQ ID NO: 7715 - RNA, 20 nt, synthetic construct
  source 1..20: mol_type = other RNA
aagcccagctaatgctgcag

SEQ ID NO: 7716 - RNA, 20 nt, synthetic construct
  source 1..20: mol_type = other RNA
caagcccagctaatgctgca

SEQ ID NO: 7717 - RNA, 20 nt, synthetic construct
  source 1..20: mol_type = other RNA
acaagcccagctaatgctgc

SEQ ID NO: 7718 - RNA, 20 nt, synthetic construct
  source 1..20: mol_type = other RNA
gtttcccctgcagcattagc

SEQ ID NO: 7719 - RNA, 20 nt, synthetic construct
  source 1..20: mol_type = other RNA
tttcccctgcagcattagct

SEQ ID NO: 7720 - RNA, 20 nt, synthetic construct
  source 1..20: mol_type = other RNA
ctgggcttgtaccacctgaa

SEQ ID NO: 7721 - RNA, 20 nt, synthetic construct
  source 1..20: mol_type = other RNA
gagatctatctccattcagg

SEQ ID NO: 7722 - RNA, 20 nt, synthetic construct
  source 1..20: mol_type = other RNA
ctggagatctatctccattc

SEQ ID NO: 7723 - RNA, 20 nt, synthetic construct
  source 1..20: mol_type = other RNA
caagagggtaagaatgattc

SEQ ID NO: 7724 - RNA, 20 nt, synthetic construct
  source 1..20: mol_type = other RNA
ttccaaagtggtgggcaaga

SEQ ID NO: 7725 - RNA, 20 nt, synthetic construct
  source 1..20: mol_type = other RNA
tttccaaagtggtgggcaag

SEQ ID NO: 7726 - RNA, 20 nt, synthetic construct
  source 1..20: mol_type = other RNA
gaagctatttccaaagtggt

SEQ ID NO: 7727 - RNA, 20 nt, synthetic construct
  source 1..20: mol_type = other RNA
taccctcttgcccaccactt

SEQ ID NO: 7728 - RNA, 20 nt, synthetic construct
  source 1..20: mol_type = other RNA
ggaagctatttccaaagtgg

SEQ ID NO: 7729 - RNA, 20 nt, synthetic construct
  source 1..20: mol_type = other RNA
gctggaagctatttccaaag

SEQ ID NO: 7730 - RNA, 20 nt, synthetic construct
  source 1..20: mol_type = other RNA
tggaaatagcttccagcagc

SEQ ID NO: 7731 - RNA, 20 nt, synthetic construct
  source 1..20: mol_type = other RNA
actggtcactttccagctgc

SEQ ID NO: 7732 - RNA, 20 nt, synthetic construct
  source 1..20: mol_type = other RNA
cagctggaaagtgaccagtg

SEQ ID NO: 7733 - RNA, 20 nt, synthetic construct
  source 1..20: mol_type = other RNA
agctggaaagtgaccagtgt

SEQ ID NO: 7734 - RNA, 20 nt, synthetic construct
  source 1..20: mol_type = other RNA
cctccagcatttgcccacac

SEQ ID NO: 7735 - RNA, 20 nt, synthetic construct
  source 1..20: mol_type = other RNA
tgaccagtgtgggcaaatgc

SEQ ID NO: 7736 - RNA, 20 nt, synthetic construct
  source 1..20: mol_type = other RNA
ccagtgtgggcaaatgctgg

SEQ ID NO: 7737 - RNA, 20 nt, synthetic construct
  source 1..20: mol_type = other RNA
gttctcagatttgaagctaa

SEQ ID NO: 7738 - RNA, 20 nt, synthetic construct
  source 1..20: mol_type = other RNA
aagctaatggacccgtttgc

SEQ ID NO: 7739 - RNA, 20 nt, synthetic construct
  source 1..20: mol_type = other RNA
gaccatgttaaccagcaaac

SEQ ID NO: 7740 - RNA, 20 nt, synthetic construct
  source 1..20: mol_type = other RNA
tgaccatgttaaccagcaaa

SEQ ID NO: 7741 - RNA, 20 nt, synthetic construct
  source 1..20: mol_type = other RNA
gacccgtttgctggttaaca

SEQ ID NO: 7742 - RNA, 20 nt, synthetic construct
  source 1..20: mol_type = other RNA
acctctgttgaatgagtgat

SEQ ID NO: 7743 - RNA, 20 nt, synthetic construct
  source 1..20: mol_type = other RNA
tacctctgttgaatgagtga

SEQ ID NO: 7744 - RNA, 20 nt, synthetic construct
  source 1..20: mol_type = other RNA
tcccatcactcattcaacag

SEQ ID NO: 7745 - RNA, 20 nt, synthetic construct
  source 1..20: mol_type = other RNA
attgagcacttgaatgactg

SEQ ID NO: 7746 - RNA, 20 nt, synthetic construct
  source 1..20: mol_type = other RNA
gattagactgtcagctcatg

SEQ ID NO: 7747 - RNA, 20 nt, synthetic construct
  source 1..20: mol_type = other RNA
cagtctaatcaactcccctc

SEQ ID NO: 7748 - RNA, 20 nt, synthetic construct
  source 1..20: mol_type = other RNA
tctaatcaactcccctctgg

SEQ ID NO: 7749 - RNA, 20 nt, synthetic construct
  source 1..20: mol_type = other RNA
ccccctgacctcctccagag

SEQ ID NO: 7750 - RNA, 20 nt, synthetic construct
  source 1..20: mol_type = other RNA
tccccctgacctcctccaga

SEQ ID NO: 7751 - RNA, 20 nt, synthetic construct
  source 1..20: mol_type = other RNA
gtccccctgacctcctccag

SEQ ID NO: 7752 - RNA, 20 nt, synthetic construct
  source 1..20: mol_type = other RNA
aatcaactcccctctggagg

SEQ ID NO: 7753 - RNA, 20 nt, synthetic construct
  source 1..20: mol_type = other RNA
actcccctctggaggaggtc

SEQ ID NO: 7754 - RNA, 20 nt, synthetic construct
  source 1..20: mol_type = other RNA
ctcccctctggaggaggtca

SEQ ID NO: 7755 - RNA, 20 nt, synthetic construct
  source 1..20: mol_type = other RNA
tcccctctggaggaggtcag

SEQ ID NO: 7756 - RNA, 20 nt, synthetic construct
  source 1..20: mol_type = other RNA
cccctctggaggaggtcagg

SEQ ID NO: 7757 - RNA, 20 nt, synthetic construct
  source 1..20: mol_type = other RNA
aggaggtcagggggacttcc

SEQ ID NO: 7758 - RNA, 20 nt, synthetic construct
  source 1..20: mol_type = other RNA
aggtcagggggacttcctgg

SEQ ID NO: 7759 - RNA, 20 nt, synthetic construct
  source 1..20: mol_type = other RNA
tcagggggacttcctggagg

SEQ ID NO: 7760 - RNA, 20 nt, synthetic construct
  source 1..20: mol_type = other RNA
gtgcagatatcacctcctcc

SEQ ID NO: 7761 - RNA, 20 nt, synthetic construct
  source 1..20: mol_type = other RNA
tctgcactgaagcttcagtg

SEQ ID NO: 7762 - RNA, 20 nt, synthetic construct
  source 1..20: mol_type = other RNA
ctgaagcttcagtgaggata

SEQ ID NO: 7763 - RNA, 20 nt, synthetic construct
  source 1..20: mol_type = other RNA
aggataaggaatgagctgag

SEQ ID NO: 7764 - RNA, 20 nt, synthetic construct
  source 1..20: mol_type = other RNA
ggataaggaatgagctgagt

SEQ ID NO: 7765 - RNA, 20 nt, synthetic construct
  source 1..20: mol_type = other RNA
gataaggaatgagctgagtg

SEQ ID NO: 7766 - RNA, 20 nt, synthetic construct
  source 1..20: mol_type = other RNA
ggaatgagctgagtggggag

SEQ ID NO: 7767 - RNA, 20 nt, synthetic construct
  source 1..20: mol_type = other RNA
gaatgagctgagtggggaga

SEQ ID NO: 7768 - RNA, 20 nt, synthetic construct
  source 1..20: mol_type = other RNA
aatgagctgagtggggagag

SEQ ID NO: 7769 - RNA, 20 nt, synthetic construct
  source 1..20: mol_type = other RNA
tggggagaggggagtaagaa

SEQ ID NO: 7770 - RNA, 20 nt, synthetic construct
  source 1..20: mol_type = other RNA
gggagtaagaaaggctttcc

SEQ ID NO: 7771 - RNA, 20 nt, synthetic construct
  source 1..20: mol_type = other RNA
cctggcgaaattacaattcc

SEQ ID NO: 7772 - RNA, 20 nt, synthetic construct
  source 1..20: mol_type = other RNA
ccaggaattgtaatttcgcc

SEQ ID NO: 7773 - RNA, 20 nt, synthetic construct
  source 1..20: mol_type = other RNA
caggaattgtaatttcgcca

SEQ ID NO: 7774 - RNA, 20 nt, synthetic construct
  source 1..20: mol_type = other RNA
attgggccttttctgatccc

SEQ ID NO: 7775 - RNA, 20 nt, synthetic construct
  source 1..20: mol_type = other RNA
atttcgccagggatcagaaa

SEQ ID NO: 7776 - RNA, 20 nt, synthetic construct
  source 1..20: mol_type = other RNA
tggaaggttggggacacatt

SEQ ID NO: 7777 - RNA, 20 nt, synthetic construct
  source 1..20: mol_type = other RNA
atggaaggttggggacacat

SEQ ID NO: 7778 - RNA, 20 nt, synthetic construct
  source 1..20: mol_type = other RNA
catcctcctatggaaggttg

SEQ ID NO: 7779 - RNA, 20 nt, synthetic construct
  source 1..20: mol_type = other RNA
gcatcctcctatggaaggtt

SEQ ID NO: 7780 - RNA, 20 nt, synthetic construct
  source 1..20: mol_type = other RNA
ggcatcctcctatggaaggt

SEQ ID NO: 7781 - RNA, 20 nt, synthetic construct
  source 1..20: mol_type = other RNA
atgtgtccccaaccttccat

SEQ ID NO: 7782 - RNA, 20 nt, synthetic construct
  source 1..20: mol_type = other RNA
tagtggcatcctcctatgga

SEQ ID NO: 7783 - RNA, 20 nt, synthetic construct
  source 1..20: mol_type = other RNA
tgtccccaaccttccatagg

SEQ ID NO: 7784 - RNA, 20 nt, synthetic construct
  source 1..20: mol_type = other RNA
gtcatagtggcatcctccta

SEQ ID NO: 7785 - RNA, 20 nt, synthetic construct
  source 1..20: mol_type = other RNA
aaaggactccatagtcatag

SEQ ID NO: 7786 - RNA, 20 nt, synthetic construct
  source 1..20: mol_type = other RNA
ggaggatgccactatgacta

SEQ ID NO: 7787 - RNA, 20 nt, synthetic construct
  source 1..20: mol_type = other RNA
tcctggccacaggagggaaa

SEQ ID NO: 7788 - RNA, 20 nt, synthetic construct
  source 1..20: mol_type = other RNA
tggagtccttttccctcctg

SEQ ID NO: 7789 - RNA, 20 nt, synthetic construct
  source 1..20: mol_type = other RNA
tgcagttcctggccacagga

SEQ ID NO: 7790 - RNA, 20 nt, synthetic construct
  source 1..20: mol_type = other RNA
gtgcagttcctggccacagg

SEQ ID NO: 7791 - RNA, 20 nt, synthetic construct
  source 1..20: mol_type = other RNA
tccttttccctcctgtggcc

SEQ ID NO: 7792 - RNA, 20 nt, synthetic construct
  source 1..20: mol_type = other RNA
gttgtgcagttcctggccac

SEQ ID NO: 7793 - RNA, 20 nt, synthetic construct
  source 1..20: mol_type = other RNA
aagggacgttgtgcagttcc

SEQ ID NO: 7794 - RNA, 20 nt, synthetic construct
  source 1..20: mol_type = other RNA
gtaaacaagctcaggcacaa

SEQ ID NO: 7795 - RNA, 20 nt, synthetic construct
  source 1..20: mol_type = other RNA
agtaaacaagctcaggcaca

SEQ ID NO: 7796 - RNA, 20 nt, synthetic construct
  source 1..20: mol_type = other RNA
ctgtggaagtaaacaagctc

SEQ ID NO: 7797 - RNA, 20 nt, synthetic construct
  source 1..20: mol_type = other RNA
cttgtttacttccacagcca

SEQ ID NO: 7798 - RNA, 20 nt, synthetic construct
  source 1..20: mol_type = other RNA
gggaggccatcccttggctg

SEQ ID NO: 7799 - RNA, 20 nt, synthetic construct
  source 1..20: mol_type = other RNA
ttgtttacttccacagccaa

SEQ ID NO: 7800 - RNA, 20 nt, synthetic construct
  source 1..20: mol_type = other RNA
ttacttccacagccaaggga

SEQ ID NO: 7801 - RNA, 20 nt, synthetic construct
  source 1..20: mol_type = other RNA
tccctggggaggccatccct

SEQ ID NO: 7802 - RNA, 20 nt, synthetic construct
  source 1..20: mol_type = other RNA
agccaagggatggcctcccc

SEQ ID NO: 7803 - RNA, 20 nt, synthetic construct
  source 1..20: mol_type = other RNA
gccaagggatggcctcccca

SEQ ID NO: 7804 - RNA, 20 nt, synthetic construct
  source 1..20: mol_type = other RNA
gggaaagattctccctgggg

SEQ ID NO: 7805 - RNA, 20 nt, synthetic construct
  source 1..20: mol_type = other RNA
tgggggaaagattctccctg

SEQ ID NO: 7806 - RNA, 20 nt, synthetic construct
  source 1..20: mol_type = other RNA
atgggggaaagattctccct

SEQ ID NO: 7807 - RNA, 20 nt, synthetic construct
  source 1..20: mol_type = other RNA
aatgggggaaagattctccc

SEQ ID NO: 7808 - RNA, 20 nt, synthetic construct
  source 1..20: mol_type = other RNA
tcctgggaatttcaaaatgg

SEQ ID NO: 7809 - RNA, 20 nt, synthetic construct
  source 1..20: mol_type = other RNA
ctcctgggaatttcaaaatg

SEQ ID NO: 7810 - RNA, 20 nt, synthetic construct
  source 1..20: mol_type = other RNA
gctcctgggaatttcaaaat

SEQ ID NO: 7811 - RNA, 20 nt, synthetic construct
  source 1..20: mol_type = other RNA
agctcctgggaatttcaaaa

SEQ ID NO: 7812 - RNA, 20 nt, synthetic construct
  source 1..20: mol_type = other RNA
tcccccattttgaaattccc

SEQ ID NO: 7813 - RNA, 20 nt, synthetic construct
  source 1..20: mol_type = other RNA
gctgcacatcaaaagctcct

SEQ ID NO: 7814 - RNA, 20 nt, synthetic construct
  source 1..20: mol_type = other RNA
agctgcacatcaaaagctcc

SEQ ID NO: 7815 - RNA, 20 nt, synthetic construct
  source 1..20: mol_type = other RNA
ggagcttttgatgtgcagct

SEQ ID NO: 7816 - RNA, 20 nt, synthetic construct
  source 1..20: mol_type = other RNA
aggatagtcccaggcaagta

SEQ ID NO: 7817 - RNA, 20 nt, synthetic construct
  source 1..20: mol_type = other RNA
caggatagtcccaggcaagt

SEQ ID NO: 7818 - RNA, 20 nt, synthetic construct
  source 1..20: mol_type = other RNA
aaaaagcaaccctacttgcc

SEQ ID NO: 7819 - RNA, 20 nt, synthetic construct
  source 1..20: mol_type = other RNA
aaaagcaaccctacttgcct

SEQ ID NO: 7820 - RNA, 20 nt, synthetic construct
  source 1..20: mol_type = other RNA
ctacttgcctgggactatcc

SEQ ID NO: 7821 - RNA, 20 nt, synthetic construct
  source 1..20: mol_type = other RNA
ctgggactaaggggcttctt

SEQ ID NO: 7822 - RNA, 20 nt, synthetic construct
  source 1..20: mol_type = other RNA
cctgggactaaggggcttct

SEQ ID NO: 7823 - RNA, 20 nt, synthetic construct
  source 1..20: mol_type = other RNA
ccagtttgcctgggactaag

SEQ ID NO: 7824 - RNA, 20 nt, synthetic construct
  source 1..20: mol_type = other RNA
cccagtttgcctgggactaa

SEQ ID NO: 7825 - RNA, 20 nt, synthetic construct
  source 1..20: mol_type = other RNA
tcccagtttgcctgggacta

SEQ ID NO: 7826 - RNA, 20 nt, synthetic construct
  source 1..20: mol_type = other RNA
ccaagaagccccttagtccc

SEQ ID NO: 7827 - RNA, 20 nt, synthetic construct
  source 1..20: mol_type = other RNA
ccaactgtcccagtttgcct

SEQ ID NO: 7828 - RNA, 20 nt, synthetic construct
  source 1..20: mol_type = other RNA
accaactgtcccagtttgcc

SEQ ID NO: 7829 - RNA, 20 nt, synthetic construct
  source 1..20: mol_type = other RNA
ccccttagtcccaggcaaac

SEQ ID NO: 7830 - RNA, 20 nt, synthetic construct
  source 1..20: mol_type = other RNA
cccttagtcccaggcaaact

SEQ ID NO: 7831 - RNA, 20 nt, synthetic construct
  source 1..20: mol_type = other RNA
cccaggcaaactgggacagt

SEQ ID NO: 7832 - RNA, 20 nt, synthetic construct
  source 1..20: mol_type = other RNA
acagttggttgctctatgtg

SEQ ID NO: 7833 - RNA, 20 nt, synthetic construct
  source 1..20: mol_type = other RNA
tggttgctctatgtgtggcc

SEQ ID NO: 7834 - RNA, 20 nt, synthetic construct
  source 1..20: mol_type = other RNA
ggttgctctatgtgtggcca

SEQ ID NO: 7835 - RNA, 20 nt, synthetic construct
  source 1..20: mol_type = other RNA
gctctatgtgtggccagggc

SEQ ID NO: 7836 - RNA, 20 nt, synthetic construct
  source 1..20: mol_type = other RNA
ctctatgtgtggccagggct

SEQ ID NO: 7837 - RNA, 20 nt, synthetic construct
  source 1..20: mol_type = other RNA
tctatgtgtggccagggctg

SEQ ID NO: 7838 - RNA, 20 nt, synthetic construct
  source 1..20: mol_type = other RNA
tagggtgtggcccccagccc

SEQ ID NO: 7839 - RNA, 20 nt, synthetic construct
  source 1..20: mol_type = other RNA
ctatgtgtggccagggctgg

SEQ ID NO: 7840 - RNA, 20 nt, synthetic construct
  source 1..20: mol_type = other RNA
agggctgggggccacaccct

SEQ ID NO: 7841 - RNA, 20 nt, synthetic construct
  source 1..20: mol_type = other RNA
cagcaacactgcctagggtg

SEQ ID NO: 7842 - RNA, 20 nt, synthetic construct
  source 1..20: mol_type = other RNA
caccccagcaacactgccta

SEQ ID NO: 7843 - RNA, 20 nt, synthetic construct
  source 1..20: mol_type = other RNA
tcaccccagcaacactgcct

SEQ ID NO: 7844 - RNA, 20 nt, synthetic construct
  source 1..20: mol_type = other RNA
cacaccctaggcagtgttgc

SEQ ID NO: 7845 - RNA, 20 nt, synthetic construct
  source 1..20: mol_type = other RNA
acaccctaggcagtgttgct

SEQ ID NO: 7846 - RNA, 20 nt, synthetic construct
  source 1..20: mol_type = other RNA
caccctaggcagtgttgctg

SEQ ID NO: 7847 - RNA, 20 nt, synthetic construct
  source 1..20: mol_type = other RNA
tgttgctggggtgacagaaa

SEQ ID NO: 7848 - RNA, 20 nt, synthetic construct
  source 1..20: mol_type = other RNA
ggtgacagaaatggagacct

SEQ ID NO: 7849 - RNA, 20 nt, synthetic construct
  source 1..20: mol_type = other RNA
cagaaatggagacctaggca

SEQ ID NO: 7850 - RNA, 20 nt, synthetic construct
  source 1..20: mol_type = other RNA
gactccctagagccttgcct

SEQ ID NO: 7851 - RNA, 20 nt, synthetic construct
  source 1..20: mol_type = other RNA
ggagacctaggcaaggctct

SEQ ID NO: 7852 - RNA, 20 nt, synthetic construct
  source 1..20: mol_type = other RNA
gagacctaggcaaggctcta

SEQ ID NO: 7853 - RNA, 20 nt, synthetic construct
  source 1..20: mol_type = other RNA
ctcagtgacccagacacaac

SEQ ID NO: 7854 - RNA, 20 nt, synthetic construct
  source 1..20: mol_type = other RNA
ctagggagtccagttgtgtc

SEQ ID NO: 7855 - RNA, 20 nt, synthetic construct
  source 1..20: mol_type = other RNA
tagggagtccagttgtgtct

SEQ ID NO: 7856 - RNA, 20 nt, synthetic construct
  source 1..20: mol_type = other RNA
cagttgtgtctgggtcactg

SEQ ID NO: 7857 - RNA, 20 nt, synthetic construct
  source 1..20: mol_type = other RNA
ttgtgtctgggtcactgagg

SEQ ID NO: 7858 - RNA, 20 nt, synthetic construct
  source 1..20: mol_type = other RNA
tgtgtctgggtcactgagga

SEQ ID NO: 7859 - RNA, 20 nt, synthetic construct
  source 1..20: mol_type = other RNA
gtgtctgggtcactgaggag

SEQ ID NO: 7860 - RNA, 20 nt, synthetic construct
  source 1..20: mol_type = other RNA
tcttggggcccatgtatggt

SEQ ID NO: 7861 - RNA, 20 nt, synthetic construct
  source 1..20: mol_type = other RNA
ttcttggggcccatgtatgg

SEQ ID NO: 7862 - RNA, 20 nt, synthetic construct
  source 1..20: mol_type = other RNA
gaggggcagcccaccataca

SEQ ID NO: 7863 - RNA, 20 nt, synthetic construct
  source 1..20: mol_type = other RNA
aggggcagcccaccatacat

SEQ ID NO: 7864 - RNA, 20 nt, synthetic construct
  source 1..20: mol_type = other RNA
gctttcttggggcccatgta

SEQ ID NO: 7865 - RNA, 20 nt, synthetic construct
  source 1..20: mol_type = other RNA
ataattattgtgctttcttg

SEQ ID NO: 7866 - RNA, 20 nt, synthetic construct
  source 1..20: mol_type = other RNA
aataattattgtgctttctt

SEQ ID NO: 7867 - RNA, 20 nt, synthetic construct
  source 1..20: mol_type = other RNA
taataattattgtgctttct

SEQ ID NO: 7868 - RNA, 20 nt, synthetic construct
  source 1..20: mol_type = other RNA
gaaaaagaaagagagaagaa

SEQ ID NO: 7869 - RNA, 20 nt, synthetic construct
  source 1..20: mol_type = other RNA
ggaagggaaaggaaagaaag

SEQ ID NO: 7870 - RNA, 20 nt, synthetic construct
  source 1..20: mol_type = other RNA
aggaaagaaaaggaagggaa

SEQ ID NO: 7871 - RNA, 20 nt, synthetic construct
  source 1..20: mol_type = other RNA
agggaaggaaagaaaaggaa

SEQ ID NO: 7872 - RNA, 20 nt, synthetic construct
  source 1..20: mol_type = other RNA
gagggaaggaaagaaaagga

SEQ ID NO: 7873 - RNA, 20 nt, synthetic construct
  source 1..20: mol_type = other RNA
gagggagggaaggaaagaaa

SEQ ID NO: 7874 - RNA, 20 nt, synthetic construct
  source 1..20: mol_type = other RNA
aggaaggagggagggaggga

SEQ ID NO: 7875 - RNA, 20 nt, synthetic construct
  source 1..20: mol_type = other RNA
aggaaggaaggagggaggga

SEQ ID NO: 7876 - RNA, 20 nt, synthetic construct
  source 1..20: mol_type = other RNA
aaggaaggaaggagggaggg

SEQ ID NO: 7877 - RNA, 20 nt, synthetic construct
  source 1..20: mol_type = other RNA
gggaaggaaggaaggaggga

SEQ ID NO: 7878 - RNA, 20 nt, synthetic construct
  source 1..20: mol_type = other RNA
agggaaggaaggaaggaggg

SEQ ID NO: 7879 - RNA, 20 nt, synthetic construct
  source 1..20: mol_type = other RNA
gggagggaaggaaggaagga

SEQ ID NO: 7880 - RNA, 20 nt, synthetic construct
  source 1..20: mol_type = other RNA
agggagggaaggaaggaagg

SEQ ID NO: 7881 - RNA, 20 nt, synthetic construct
  source 1..20: mol_type = other RNA
gggagggagggaaggaagga

SEQ ID NO: 7882 - RNA, 20 nt, synthetic construct
  source 1..20: mol_type = other RNA
agaagggagggagggaagga

SEQ ID NO: 7883 - RNA, 20 nt, synthetic construct
  source 1..20: mol_type = other RNA
gggaagaagggagggaggga

SEQ ID NO: 7884 - RNA, 20 nt, synthetic construct
  source 1..20: mol_type = other RNA
aagggggaagaagggaggga

SEQ ID NO: 7885 - RNA, 20 nt, synthetic construct
  source 1..20: mol_type = other RNA
aaagggggaagaagggaggg

SEQ ID NO: 7886 - RNA, 20 nt, synthetic construct
  source 1..20: mol_type = other RNA
agaaaagggggaagaaggga

SEQ ID NO: 7887 - RNA, 20 nt, synthetic construct
  source 1..20: mol_type = other RNA
aagaaaagggggaagaaggg

SEQ ID NO: 7888 - RNA, 20 nt, synthetic construct
  source 1..20: mol_type = other RNA
aagaagaaaagggggaagaa

SEQ ID NO: 7889 - RNA, 20 nt, synthetic construct
  source 1..20: mol_type = other RNA
aaagaagaaaagggggaaga

SEQ ID NO: 7890 - RNA, 20 nt, synthetic construct
  source 1..20: mol_type = other RNA
gaaagaaaaagaagaaaagg

SEQ ID NO: 7891 - RNA, 20 nt, synthetic construct
  source 1..20: mol_type = other RNA
agaaagaaaaagaagaaaag

SEQ ID NO: 7892 - RNA, 20 nt, synthetic construct
  source 1..20: mol_type = other RNA
gagaaagaaaaagaagaaaa

SEQ ID NO: 7893 - RNA, 20 nt, synthetic construct
  source 1..20: mol_type = other RNA
agagaaagaaaaagaagaaa

SEQ ID NO: 7894 - RNA, 20 nt, synthetic construct
  source 1..20: mol_type = other RNA
gatagggagggaggaaggaa

SEQ ID NO: 7895 - RNA, 20 nt, synthetic construct
  source 1..20: mol_type = other RNA
agatagggagggaggaagga

SEQ ID NO: 7896 - RNA, 20 nt, synthetic construct
  source 1..20: mol_type = other RNA
agagagatagggagggagga

SEQ ID NO: 7897 - RNA, 20 nt, synthetic construct
  source 1..20: mol_type = other RNA
aaagagagagatagggaggg

SEQ ID NO: 7898 - RNA, 20 nt, synthetic construct
  source 1..20: mol_type = other RNA
aagaaagagagagataggga

SEQ ID NO: 7899 - RNA, 20 nt, synthetic construct
  source 1..20: mol_type = other RNA
aaagaaagagagagataggg

SEQ ID NO: 7900 - RNA, 20 nt, synthetic construct
  source 1..20: mol_type = other RNA
aagaaagaaagagagagata

SEQ ID NO: 7901 - RNA, 20 nt, synthetic construct
  source 1..20: mol_type = other RNA
aaagaaagaaagagagagat

SEQ ID NO: 7902 - RNA, 20 nt, synthetic construct
  source 1..20: mol_type = other RNA
gaaaggaaagaaagaaaaga

SEQ ID NO: 7903 - RNA, 20 nt, synthetic construct
  source 1..20: mol_type = other RNA
aagaaagagaaaggagagaa

SEQ ID NO: 7904 - RNA, 20 nt, synthetic construct
  source 1..20: mol_type = other RNA
atggaaagaaagaaagagaa

SEQ ID NO: 7905 - RNA, 20 nt, synthetic construct
  source 1..20: mol_type = other RNA
ggaaagagaaagaaagagaa

SEQ ID NO: 7906 - RNA, 20 nt, synthetic construct
  source 1..20: mol_type = other RNA
gaagagaaggaagggaggga

SEQ ID NO: 7907 - RNA, 20 nt, synthetic construct
  source 1..20: mol_type = other RNA
gaaggaagagaaggaaggga

SEQ ID NO: 7908 - RNA, 20 nt, synthetic construct
  source 1..20: mol_type = other RNA
ggaaggaagagaaggaaggg

SEQ ID NO: 7909 - RNA, 20 nt, synthetic construct
  source 1..20: mol_type = other RNA
gaaggaaggaagagaaggaa

SEQ ID NO: 7910 - RNA, 20 nt, synthetic construct
  source 1..20: mol_type = other RNA
agaaggaaggaagagaagga

SEQ ID NO: 7911 - RNA, 20 nt, synthetic construct
  source 1..20: mol_type = other RNA
aaaaagaaggaaggaagaga

SEQ ID NO: 7912 - RNA, 20 nt, synthetic construct
  source 1..20: mol_type = other RNA
aaggaaaggaaaaagaagga

SEQ ID NO: 7913 - RNA, 20 nt, synthetic construct
  source 1..20: mol_type = other RNA
agaaaaggaaaggaaaaaga

SEQ ID NO: 7914 - RNA, 20 nt, synthetic construct
  source 1..20: mol_type = other RNA
agaaaaggaaagaaaaggaa

SEQ ID NO: 7915 - RNA, 20 nt, synthetic construct
  source 1..20: mol_type = other RNA
agaaaagaaaaggaaagaaa

SEQ ID NO: 7916 - RNA, 20 nt, synthetic construct
  source 1..20: mol_type = other RNA
gcctcaagaaagaaaagaaa

SEQ ID NO: 7917 - RNA, 20 nt, synthetic construct
  source 1..20: mol_type = other RNA
tccttttcttttctttcttg

SEQ ID NO: 7918 - RNA, 20 nt, synthetic construct
  source 1..20: mol_type = other RNA
agagtcttactctgtccctc

SEQ ID NO: 7919 - RNA, 20 nt, synthetic construct
  source 1..20: mol_type = other RNA
tcttactctgtccctcaggc

SEQ ID NO: 7920 - RNA, 20 nt, synthetic construct
  source 1..20: mol_type = other RNA
gccactgaactccagcctga

SEQ ID NO: 7921 - RNA, 20 nt, synthetic construct
  source 1..20: mol_type = other RNA
tgccactgaactccagcctg

SEQ ID NO: 7922 - RNA, 20 nt, synthetic construct
  source 1..20: mol_type = other RNA
tccctcaggctggagttcag

SEQ ID NO: 7923 - RNA, 20 nt, synthetic construct
  source 1..20: mol_type = other RNA
gcctagggaggttgaggctg

SEQ ID NO: 7924 - RNA, 20 nt, synthetic construct
  source 1..20: mol_type = other RNA
acttgagcctagggaggttg

SEQ ID NO: 7925 - RNA, 20 nt, synthetic construct
  source 1..20: mol_type = other RNA
accacagcctcaacctccct

SEQ ID NO: 7926 - RNA, 20 nt, synthetic construct
  source 1..20: mol_type = other RNA
aggatcacttgagcctaggg

SEQ ID NO: 7927 - RNA, 20 nt, synthetic construct
  source 1..20: mol_type = other RNA
gggaggatcacttgagccta

SEQ ID NO: 7928 - RNA, 20 nt, synthetic construct
  source 1..20: mol_type = other RNA
tgggaggatcacttgagcct

SEQ ID NO: 7929 - RNA, 20 nt, synthetic construct
  source 1..20: mol_type = other RNA
actagggaggctgaggtggg

SEQ ID NO: 7930 - RNA, 20 nt, synthetic construct
  source 1..20: mol_type = other RNA
gctactagggaggctgaggt

SEQ ID NO: 7931 - RNA, 20 nt, synthetic construct
  source 1..20: mol_type = other RNA
agctactagggaggctgagg

SEQ ID NO: 7932 - RNA, 20 nt, synthetic construct
  source 1..20: mol_type = other RNA
cccagctactagggaggctg

SEQ ID NO: 7933 - RNA, 20 nt, synthetic construct
  source 1..20: mol_type = other RNA
tgtagtcccagctactaggg

SEQ ID NO: 7934 - RNA, 20 nt, synthetic construct
  source 1..20: mol_type = other RNA
gcctgtagtcccagctacta

SEQ ID NO: 7935 - RNA, 20 nt, synthetic construct
  source 1..20: mol_type = other RNA
acctcagcctccctagtagc

SEQ ID NO: 7936 - RNA, 20 nt, synthetic construct
  source 1..20: mol_type = other RNA
tgcctgtagtcccagctact

SEQ ID NO: 7937 - RNA, 20 nt, synthetic construct
  source 1..20: mol_type = other RNA
cctcagcctccctagtagct

SEQ ID NO: 7938 - RNA, 20 nt, synthetic construct
  source 1..20: mol_type = other RNA
tccctagtagctgggactac

SEQ ID NO: 7939 - RNA, 20 nt, synthetic construct
  source 1..20: mol_type = other RNA
atacaaaaattagtcaggtg

SEQ ID NO: 7940 - RNA, 20 nt, synthetic construct
  source 1..20: mol_type = other RNA
aatacaaaaattagtcaggt

SEQ ID NO: 7941 - RNA, 20 nt, synthetic construct
  source 1..20: mol_type = other RNA
aaatacaaaaattagtcagg

SEQ ID NO: 7942 - RNA, 20 nt, synthetic construct
  source 1..20: mol_type = other RNA
aaaaaatacaaaaattagtc

SEQ ID NO: 7943 - RNA, 20 nt, synthetic construct
  source 1..20: mol_type = other RNA
tttgtattttttgtagagac

SEQ ID NO: 7944 - RNA, 20 nt, synthetic construct
  source 1..20: mol_type = other RNA
cgagaccagactgggcaaca

SEQ ID NO: 7945 - RNA, 20 nt, synthetic construct
  source 1..20: mol_type = other RNA
tttcaccatgttgcccagtc

SEQ ID NO: 7946 - RNA, 20 nt, synthetic construct
  source 1..20: mol_type = other RNA
caggagctcgagaccagact

SEQ ID NO: 7947 - RNA, 20 nt, synthetic construct
  source 1..20: mol_type = other RNA
ccaggagctcgagaccagac

SEQ ID NO: 7948 - RNA, 20 nt, synthetic construct
  source 1..20: mol_type = other RNA
ccagtctggtctcgagctcc

SEQ ID NO: 7949 - RNA, 20 nt, synthetic construct
  source 1..20: mol_type = other RNA
cagtctggtctcgagctcct

SEQ ID NO: 7950 - RNA, 20 nt, synthetic construct
  source 1..20: mol_type = other RNA
tgggaggattgcttgagccc

SEQ ID NO: 7951 - RNA, 20 nt, synthetic construct
  source 1..20: mol_type = other RNA
ctttgggaggctgaggtggg

SEQ ID NO: 7952 - RNA, 20 nt, synthetic construct
  source 1..20: mol_type = other RNA
gcactttgggaggctgaggt

SEQ ID NO: 7953 - RNA, 20 nt, synthetic construct
  source 1..20: mol_type = other RNA
agcactttgggaggctgagg

SEQ ID NO: 7954 - RNA, 20 nt, synthetic construct
  source 1..20: mol_type = other RNA
cctagcactttgggaggctg

SEQ ID NO: 7955 - RNA, 20 nt, synthetic construct
  source 1..20: mol_type = other RNA
tgtaatcctagcactttggg

SEQ ID NO: 7956 - RNA, 20 nt, synthetic construct
  source 1..20: mol_type = other RNA
acctgtaatcctagcacttt

SEQ ID NO: 7957 - RNA, 20 nt, synthetic construct
  source 1..20: mol_type = other RNA
cacctgtaatcctagcactt

SEQ ID NO: 7958 - RNA, 20 nt, synthetic construct
  source 1..20: mol_type = other RNA
cctcagcctcccaaagtgct

SEQ ID NO: 7959 - RNA, 20 nt, synthetic construct
  source 1..20: mol_type = other RNA
tcccaaagtgctaggattac

SEQ ID NO: 7960 - RNA, 20 nt, synthetic construct
  source 1..20: mol_type = other RNA
caggtgcgagctcccgcacc

SEQ ID NO: 7961 - RNA, 20 nt, synthetic construct
  source 1..20: mol_type = other RNA
agcctgttctggccaggtgc

SEQ ID NO: 7962 - RNA, 20 nt, synthetic construct
  source 1..20: mol_type = other RNA
aagcctgttctggccaggtg

SEQ ID NO: 7963 - RNA, 20 nt, synthetic construct
  source 1..20: mol_type = other RNA
tttaaaagcctgttctggcc

SEQ ID NO: 7964 - RNA, 20 nt, synthetic construct
  source 1..20: mol_type = other RNA
ctcccgcacctggccagaac

SEQ ID NO: 7965 - RNA, 20 nt, synthetic construct
  source 1..20: mol_type = other RNA
gcaaatttaaaagcctgttc

SEQ ID NO: 7966 - RNA, 20 nt, synthetic construct
  source 1..20: mol_type = other RNA
cctgagataattgagatgga

SEQ ID NO: 7967 - RNA, 20 nt, synthetic construct
  source 1..20: mol_type = other RNA
gtggcctgagataattgaga

SEQ ID NO: 7968 - RNA, 20 nt, synthetic construct
  source 1..20: mol_type = other RNA
ccttccatctcaattatctc

SEQ ID NO: 7969 - RNA, 20 nt, synthetic construct
  source 1..20: mol_type = other RNA
acaatgcctgtagaggaggg

SEQ ID NO: 7970 - RNA, 20 nt, synthetic construct
  source 1..20: mol_type = other RNA
atgacaatgcctgtagagga

SEQ ID NO: 7971 - RNA, 20 nt, synthetic construct
  source 1..20: mol_type = other RNA
gatgacaatgcctgtagagg

SEQ ID NO: 7972 - RNA, 20 nt, synthetic construct
  source 1..20: mol_type = other RNA
ctcaggccaccctcctctac

SEQ ID NO: 7973 - RNA, 20 nt, synthetic construct
  source 1..20: mol_type = other RNA
gatgatgacaatgcctgtag

SEQ ID NO: 7974 - RNA, 20 nt, synthetic construct
  source 1..20: mol_type = other RNA
gcattgccatttgtacaatg

SEQ ID NO: 7975 - RNA, 20 nt, synthetic construct
  source 1..20: mol_type = other RNA
agcattgccatttgtacaat

SEQ ID NO: 7976 - RNA, 20 nt, synthetic construct
  source 1..20: mol_type = other RNA
cagcattgccatttgtacaa

SEQ ID NO: 7977 - RNA, 20 nt, synthetic construct
  source 1..20: mol_type = other RNA
tcatctccccattgtacaaa

SEQ ID NO: 7978 - RNA, 20 nt, synthetic construct
  source 1..20: mol_type = other RNA
tgacctgacctttatgactt

SEQ ID NO: 7979 - RNA, 20 nt, synthetic construct
  source 1..20: mol_type = other RNA
ttgtttatccaaagtcataa

SEQ ID NO: 7980 - RNA, 20 nt, synthetic construct
  source 1..20: mol_type = other RNA
tatccaaagtcataaaggtc

SEQ ID NO: 7981 - RNA, 20 nt, synthetic construct
  source 1..20: mol_type = other RNA
tcataaaggtcaggtcagcc

SEQ ID NO: 7982 - RNA, 20 nt, synthetic construct
  source 1..20: mol_type = other RNA
tgtggaaggagcttagggcc

SEQ ID NO: 7983 - RNA, 20 nt, synthetic construct
  source 1..20: mol_type = other RNA
ttttctgtggaaggagctta

SEQ ID NO: 7984 - RNA, 20 nt, synthetic construct
  source 1..20: mol_type = other RNA
tttttctgtggaaggagctt

SEQ ID NO: 7985 - RNA, 20 nt, synthetic construct
  source 1..20: mol_type = other RNA
catttagctttttctgtgga

SEQ ID NO: 7986 - RNA, 20 nt, synthetic construct
  source 1..20: mol_type = other RNA
cattcatttagctttttctg

SEQ ID NO: 7987 - RNA, 20 nt, synthetic construct
  source 1..20: mol_type = other RNA
ctaaatgaatgtttgttcct

SEQ ID NO: 7988 - RNA, 20 nt, synthetic construct
  source 1..20: mol_type = other RNA
atgaatgtttgttccttggt

SEQ ID NO: 7989 - RNA, 20 nt, synthetic construct
  source 1..20: mol_type = other RNA
tgaatgtttgttccttggta

SEQ ID NO: 7990 - RNA, 20 nt, synthetic construct
  source 1..20: mol_type = other RNA
gaatgtttgttccttggtag

SEQ ID NO: 7991 - RNA, 20 nt, synthetic construct
  source 1..20: mol_type = other RNA
gatgatctagacccctacca

SEQ ID NO: 7992 - RNA, 20 nt, synthetic construct
  source 1..20: mol_type = other RNA
gtctagatcatctaatgatt

SEQ ID NO: 7993 - RNA, 20 nt, synthetic construct
  source 1..20: mol_type = other RNA
agatcatctaatgattagga

SEQ ID NO: 7994 - RNA, 20 nt, synthetic construct
  source 1..20: mol_type = other RNA
ggaaggagttgttatgcctg

SEQ ID NO: 7995 - RNA, 20 nt, synthetic construct
  source 1..20: mol_type = other RNA
aacagcaccgaatataccac

SEQ ID NO: 7996 - RNA, 20 nt, synthetic construct
  source 1..20: mol_type = other RNA
tgttatgcctgtggtatatt

SEQ ID NO: 7997 - RNA, 20 nt, synthetic construct
  source 1..20: mol_type = other RNA
tattcggtgctgtttttttt

SEQ ID NO: 7998 - RNA, 20 nt, synthetic construct
  source 1..20: mol_type = other RNA
gtgctgtttttttttggaga

SEQ ID NO: 7999 - RNA, 20 nt, synthetic construct
  source 1..20: mol_type = other RNA
tgctgtttttttttggagat

SEQ ID NO: 8000 - RNA, 20 nt, synthetic construct
  source 1..20: mol_type = other RNA
gctgtttttttttggagatg

SEQ ID NO: 8001 - RNA, 20 nt, synthetic construct
  source 1..20: mol_type = other RNA
ggggtcttgctctgtcaccc

SEQ ID NO: 8002 - RNA, 20 nt, synthetic construct
  source 1..20: mol_type = other RNA
ataccactgcattctagcct

SEQ ID NO: 8003 - RNA, 20 nt, synthetic construct
  source 1..20: mol_type = other RNA
cataccactgcattctagcc

SEQ ID NO: 8004 - RNA, 20 nt, synthetic construct
  source 1..20: mol_type = other RNA
tcacccaggctagaatgcag

SEQ ID NO: 8005 - RNA, 20 nt, synthetic construct
  source 1..20: mol_type = other RNA
agaatgcagtggtatgatct

SEQ ID NO: 8006 - RNA, 20 nt, synthetic construct
  source 1..20: mol_type = other RNA
tcactgcaatctccacctct

SEQ ID NO: 8007 - RNA, 20 nt, synthetic construct
  source 1..20: mol_type = other RNA
aaattgcttgaaccgagagg

SEQ ID NO: 8008 - RNA, 20 nt, synthetic construct
  source 1..20: mol_type = other RNA
ggaaaattgcttgaaccgag

SEQ ID NO: 8009 - RNA, 20 nt, synthetic construct
  source 1..20: mol_type = other RNA
gctactcgggaggctgaggc

SEQ ID NO: 8010 - RNA, 20 nt, synthetic construct
  source 1..20: mol_type = other RNA
cccagctactcgggaggctg

SEQ ID NO: 8011 - RNA, 20 nt, synthetic construct
  source 1..20: mol_type = other RNA
tgtaatcccagctactcggg

SEQ ID NO: 8012 - RNA, 20 nt, synthetic construct
  source 1..20: mol_type = other RNA
acctgtaatcccagctactc

SEQ ID NO: 8013 - RNA, 20 nt, synthetic construct
  source 1..20: mol_type = other RNA
gcctcagcctcccgagtagc

SEQ ID NO: 8014 - RNA, 20 nt, synthetic construct
  source 1..20: mol_type = other RNA
cacctgtaatcccagctact

SEQ ID NO: 8015 - RNA, 20 nt, synthetic construct
  source 1..20: mol_type = other RNA
cctcagcctcccgagtagct

SEQ ID NO: 8016 - RNA, 20 nt, synthetic construct
  source 1..20: mol_type = other RNA
tcccgagtagctgggattac

SEQ ID NO: 8017 - RNA, 20 nt, synthetic construct
  source 1..20: mol_type = other RNA
caaaaattagccaggtgtag

SEQ ID NO: 8018 - RNA, 20 nt, synthetic construct
  source 1..20: mol_type = other RNA
caggtgtacaccactacacc

SEQ ID NO: 8019 - RNA, 20 nt, synthetic construct
  source 1..20: mol_type = other RNA
taaaaatacaaaaattagcc

SEQ ID NO: 8020 - RNA, 20 nt, synthetic construct
  source 1..20: mol_type = other RNA
ttttgtatttttagtagaga

SEQ ID NO: 8021 - RNA, 20 nt, synthetic construct
  source 1..20: mol_type = other RNA
tttgtatttttagtagagac

SEQ ID NO: 8022 - RNA, 20 nt, synthetic construct
  source 1..20: mol_type = other RNA
gagacgggctttaaccatgt

SEQ ID NO: 8023 - RNA, 20 nt, synthetic construct
  source 1..20: mol_type = other RNA
caagaccagcctggccaaca

SEQ ID NO: 8024 - RNA, 20 nt, synthetic construct
  source 1..20: mol_type = other RNA
gggctttaaccatgttggcc

SEQ ID NO: 8025 - RNA, 20 nt, synthetic construct
  source 1..20: mol_type = other RNA
tttaaccatgttggccaggc

SEQ ID NO: 8026 - RNA, 20 nt, synthetic construct
  source 1..20: mol_type = other RNA
ccaggagttcaagaccagcc

SEQ ID NO: 8027 - RNA, 20 nt, synthetic construct
  source 1..20: mol_type = other RNA
ccaggctggtcttgaactcc

SEQ ID NO: 8028 - RNA, 20 nt, synthetic construct
  source 1..20: mol_type = other RNA
tgggaggaacatctgaggcc

SEQ ID NO: 8029 - RNA, 20 nt, synthetic construct
  source 1..20: mol_type = other RNA
tgaggtgggaggaacatctg

SEQ ID NO: 8030 - RNA, 20 nt, synthetic construct
  source 1..20: mol_type = other RNA
ctttgggaggctgaggtggg

SEQ ID NO: 8031 - RNA, 20 nt, synthetic construct
  source 1..20: mol_type = other RNA
gcactttgggaggctgaggt

SEQ ID NO: 8032 - RNA, 20 nt, synthetic construct
  source 1..20: mol_type = other RNA
agcactttgggaggctgagg

SEQ ID NO: 8033 - RNA, 20 nt, synthetic construct
  source 1..20: mol_type = other RNA
cccagcactttgggaggctg

SEQ ID NO: 8034 - RNA, 20 nt, synthetic construct
  source 1..20: mol_type = other RNA
tgtaatcccagcactttggg

SEQ ID NO: 8035 - RNA, 20 nt, synthetic construct
  source 1..20: mol_type = other RNA
acctgtaatcccagcacttt

SEQ ID NO: 8036 - RNA, 20 nt, synthetic construct
  source 1..20: mol_type = other RNA
acctcagcctcccaaagtgc

SEQ ID NO: 8037 - RNA, 20 nt, synthetic construct
  source 1..20: mol_type = other RNA
cacctgtaatcccagcactt

SEQ ID NO: 8038 - RNA, 20 nt, synthetic construct
  source 1..20: mol_type = other RNA
cctcagcctcccaaagtgct

SEQ ID NO: 8039 - RNA, 20 nt, synthetic construct
  source 1..20: mol_type = other RNA
tcccaaagtgctgggattac

SEQ ID NO: 8040 - RNA, 20 nt, synthetic construct
  source 1..20: mol_type = other RNA
gaattataagctgggcatgg

SEQ ID NO: 8041 - RNA, 20 nt, synthetic construct
  source 1..20: mol_type = other RNA
actgaattataagctgggca

SEQ ID NO: 8042 - RNA, 20 nt, synthetic construct
  source 1..20: mol_type = other RNA
aatgcactgaattataagct

SEQ ID NO: 8043 - RNA, 20 nt, synthetic construct
  source 1..20: mol_type = other RNA
aaatgcactgaattataagc

SEQ ID NO: 8044 - RNA, 20 nt, synthetic construct
  source 1..20: mol_type = other RNA
attaatctcaagagctactg

SEQ ID NO: 8045 - RNA, 20 nt, synthetic construct
  source 1..20: mol_type = other RNA
gtctcctcatctgtaaaatg

SEQ ID NO: 8046 - RNA, 20 nt, synthetic construct
  source 1..20: mol_type = other RNA
cgtctcctcatctgtaaaat

SEQ ID NO: 8047 - RNA, 20 nt, synthetic construct
  source 1..20: mol_type = other RNA
ccgtctcctcatctgtaaaa

SEQ ID NO: 8048 - RNA, 20 nt, synthetic construct
  source 1..20: mol_type = other RNA
tcttccccattttacagatg

SEQ ID NO: 8049 - RNA, 20 nt, synthetic construct
  source 1..20: mol_type = other RNA
ccattttacagatgaggaga

SEQ ID NO: 8050 - RNA, 20 nt, synthetic construct
  source 1..20: mol_type = other RNA
ttttacagatgaggagacgg

SEQ ID NO: 8051 - RNA, 20 nt, synthetic construct
  source 1..20: mol_type = other RNA
cagatgaggagacggaggcc

SEQ ID NO: 8052 - RNA, 20 nt, synthetic construct
  source 1..20: mol_type = other RNA
gaggagacggaggcctggtg

SEQ ID NO: 8053 - RNA, 20 nt, synthetic construct
  source 1..20: mol_type = other RNA
gcaagtcacttaacctcacc

SEQ ID NO: 8054 - RNA, 20 nt, synthetic construct
  source 1..20: mol_type = other RNA
gaggttaagtgacttgcccg

SEQ ID NO: 8055 - RNA, 20 nt, synthetic construct
  source 1..20: mol_type = other RNA
gtgaccagctgggggaccac

SEQ ID NO: 8056 - RNA, 20 nt, synthetic construct
  source 1..20: mol_type = other RNA
ggtgaccagctgggggacca

SEQ ID NO: 8057 - RNA, 20 nt, synthetic construct
  source 1..20: mol_type = other RNA
cttgcccgtggtcccccagc

SEQ ID NO: 8058 - RNA, 20 nt, synthetic construct
  source 1..20: mol_type = other RNA
gcttgtgggtgaccagctgg

SEQ ID NO: 8059 - RNA, 20 nt, synthetic construct
  source 1..20: mol_type = other RNA
agcttgtgggtgaccagctg

SEQ ID NO: 8060 - RNA, 20 nt, synthetic construct
  source 1..20: mol_type = other RNA
tagcttgtgggtgaccagct

SEQ ID NO: 8061 - RNA, 20 nt, synthetic construct
  source 1..20: mol_type = other RNA
atagcttgtgggtgaccagc

SEQ ID NO: 8062 - RNA, 20 nt, synthetic construct
  source 1..20: mol_type = other RNA
agggagagctgatagcttgt

SEQ ID NO: 8063 - RNA, 20 nt, synthetic construct
  source 1..20: mol_type = other RNA
cagggagagctgatagcttg

SEQ ID NO: 8064 - RNA, 20 nt, synthetic construct
  source 1..20: mol_type = other RNA
gcacaggggagcagtgatca

SEQ ID NO: 8065 - RNA, 20 nt, synthetic construct
  source 1..20: mol_type = other RNA
ggcacaggggagcagtgatc

SEQ ID NO: 8066 - RNA, 20 nt, synthetic construct
  source 1..20: mol_type = other RNA
ggcttttttctggggcacag

SEQ ID NO: 8067 - RNA, 20 nt, synthetic construct
  source 1..20: mol_type = other RNA
tggcttttttctggggcaca

SEQ ID NO: 8068 - RNA, 20 nt, synthetic construct
  source 1..20: mol_type = other RNA
ctggcttttttctggggcac

SEQ ID NO: 8069 - RNA, 20 nt, synthetic construct
  source 1..20: mol_type = other RNA
gagacactggcttttttctg

SEQ ID NO: 8070 - RNA, 20 nt, synthetic construct
  source 1..20: mol_type = other RNA
agagacactggcttttttct

SEQ ID NO: 8071 - RNA, 20 nt, synthetic construct
  source 1..20: mol_type = other RNA
aagagacactggcttttttc

SEQ ID NO: 8072 - RNA, 20 nt, synthetic construct
  source 1..20: mol_type = other RNA
ctgttcaaaacaagagacac

SEQ ID NO: 8073 - RNA, 20 nt, synthetic construct
  source 1..20: mol_type = other RNA
tcttgttttgaacagagaca

SEQ ID NO: 8074 - RNA, 20 nt, synthetic construct
  source 1..20: mol_type = other RNA
aaggtgctaaatttgtccag

SEQ ID NO: 8075 - RNA, 20 nt, synthetic construct
  source 1..20: mol_type = other RNA
ttcagcatcatttttacctc

SEQ ID NO: 8076 - RNA, 20 nt, synthetic construct
  source 1..20: mol_type = other RNA
aggtaaaaatgatgctgaaa

SEQ ID NO: 8077 - RNA, 20 nt, synthetic construct
  source 1..20: mol_type = other RNA
ggtaaaaatgatgctgaaaa

SEQ ID NO: 8078 - RNA, 20 nt, synthetic construct
  source 1..20: mol_type = other RNA
gtaaaaatgatgctgaaaag

SEQ ID NO: 8079 - RNA, 20 nt, synthetic construct
  source 1..20: mol_type = other RNA
atgtctgaaaacaataactg

SEQ ID NO: 8080 - RNA, 20 nt, synthetic construct
  source 1..20: mol_type = other RNA
tgtctgaaaacaataactga

SEQ ID NO: 8081 - RNA, 20 nt, synthetic construct
  source 1..20: mol_type = other RNA
caataactgagggccctttc

SEQ ID NO: 8082 - RNA, 20 nt, synthetic construct
  source 1..20: mol_type = other RNA
aaataatttaaggccagaaa

SEQ ID NO: 8083 - RNA, 20 nt, synthetic construct
  source 1..20: mol_type = other RNA
aaaataatttaaggccagaa

SEQ ID NO: 8084 - RNA, 20 nt, synthetic construct
  source 1..20: mol_type = other RNA
tttcagctgaaaataattta

SEQ ID NO: 8085 - RNA, 20 nt, synthetic construct
  source 1..20: mol_type = other RNA
cagttccgatcttgaactag

SEQ ID NO: 8086 - RNA, 20 nt, synthetic construct
  source 1..20: mol_type = other RNA
gcagttccgatcttgaacta

SEQ ID NO: 8087 - RNA, 20 nt, synthetic construct
  source 1..20: mol_type = other RNA
cgcagttccgatcttgaact

SEQ ID NO: 8088 - RNA, 20 nt, synthetic construct
  source 1..20: mol_type = other RNA
aaaagcccctagttcaagat

SEQ ID NO: 8089 - RNA, 20 nt, synthetic construct
  source 1..20: mol_type = other RNA
tcaagatcggaactgcgctc

SEQ ID NO: 8090 - RNA, 20 nt, synthetic construct
  source 1..20: mol_type = other RNA
caagatcggaactgcgctct

SEQ ID NO: 8091 - RNA, 20 nt, synthetic construct
  source 1..20: mol_type = other RNA
aagatcggaactgcgctctg

SEQ ID NO: 8092 - RNA, 20 nt, synthetic construct
  source 1..20: mol_type = other RNA
aactgcgctctggggaacag

SEQ ID NO: 8093 - RNA, 20 nt, synthetic construct
  source 1..20: mol_type = other RNA
gctctggggaacagcggcca

SEQ ID NO: 8094 - RNA, 20 nt, synthetic construct
  source 1..20: mol_type = other RNA
ctctggggaacagcggccat

SEQ ID NO: 8095 - RNA, 20 nt, synthetic construct
  source 1..20: mol_type = other RNA
tctggggaacagcggccatg

SEQ ID NO: 8096 - RNA, 20 nt, synthetic construct
  source 1..20: mol_type = other RNA
ggggaacagcggccatgggg

SEQ ID NO: 8097 - RNA, 20 nt, synthetic construct
  source 1..20: mol_type = other RNA
ctctaggctgttccacccca

SEQ ID NO: 8098 - RNA, 20 nt, synthetic construct
  source 1..20: mol_type = other RNA
ggggtggaacagcctagagc

SEQ ID NO: 8099 - RNA, 20 nt, synthetic construct
  source 1..20: mol_type = other RNA
gggtggaacagcctagagcc

SEQ ID NO: 8100 - RNA, 20 nt, synthetic construct
  source 1..20: mol_type = other RNA
gtggctgatcacccggctct

SEQ ID NO: 8101 - RNA, 20 nt, synthetic construct
  source 1..20: mol_type = other RNA
tctccaggtggctgatcacc

SEQ ID NO: 8102 - RNA, 20 nt, synthetic construct
  source 1..20: mol_type = other RNA
gagccgggtgatcagccacc

SEQ ID NO: 8103 - RNA, 20 nt, synthetic construct
  source 1..20: mol_type = other RNA
gggggcttccggtctccagg

SEQ ID NO: 8104 - RNA, 20 nt, synthetic construct
  source 1..20: mol_type = other RNA
gtgatcagccacctggagac

SEQ ID NO: 8105 - RNA, 20 nt, synthetic construct
  source 1..20: mol_type = other RNA
ctcgggggcttccggtctcc

SEQ ID NO: 8106 - RNA, 20 nt, synthetic construct
  source 1..20: mol_type = other RNA
agaacctcctcgggggcttc

SEQ ID NO: 8107 - RNA, 20 nt, synthetic construct
  source 1..20: mol_type = other RNA
ctggagaccggaagcccccg

SEQ ID NO: 8108 - RNA, 20 nt, synthetic construct
  source 1..20: mol_type = other RNA
gagaccggaagcccccgagg

SEQ ID NO: 8109 - RNA, 20 nt, synthetic construct
  source 1..20: mol_type = other RNA
cttcctcagaacctcctcgg

SEQ ID NO: 8110 - RNA, 20 nt, synthetic construct
  source 1..20: mol_type = other RNA
ccttcctcagaacctcctcg

SEQ ID NO: 8111 - RNA, 20 nt, synthetic construct
  source 1..20: mol_type = other RNA
tccttcctcagaacctcctc

SEQ ID NO: 8112 - RNA, 20 nt, synthetic construct
  source 1..20: mol_type = other RNA
ttccttcctcagaacctcct

SEQ ID NO: 8113 - RNA, 20 nt, synthetic construct
  source 1..20: mol_type = other RNA
aagcccccgaggaggttctg

SEQ ID NO: 8114 - RNA, 20 nt, synthetic construct
  source 1..20: mol_type = other RNA
ccccgaggaggttctgagga

SEQ ID NO: 8115 - RNA, 20 nt, synthetic construct
  source 1..20: mol_type = other RNA
gaggaggttctgaggaagga

SEQ ID NO: 8116 - RNA, 20 nt, synthetic construct
  source 1..20: mol_type = other RNA
aggttctgaggaaggaagga

SEQ ID NO: 8117 - RNA, 20 nt, synthetic construct
  source 1..20: mol_type = other RNA
tctgaggaaggaaggaagga

SEQ ID NO: 8118 - RNA, 20 nt, synthetic construct
  source 1..20: mol_type = other RNA
aggaaggaaaagactatttc

SEQ ID NO: 8119 - RNA, 20 nt, synthetic construct
  source 1..20: mol_type = other RNA
actatttctggcattttctc

SEQ ID NO: 8120 - RNA, 20 nt, synthetic construct
  source 1..20: mol_type = other RNA
ctcaggcttctactgtgccc

SEQ ID NO: 8121 - RNA, 20 nt, synthetic construct
  source 1..20: mol_type = other RNA
atgaggtctacagggtgcct

SEQ ID NO: 8122 - RNA, 20 nt, synthetic construct
  source 1..20: mol_type = other RNA
gatgaggtctacagggtgcc

SEQ ID NO: 8123 - RNA, 20 nt, synthetic construct
  source 1..20: mol_type = other RNA
acagacagatgaggtctaca

SEQ ID NO: 8124 - RNA, 20 nt, synthetic construct
  source 1..20: mol_type = other RNA
gacagacagatgaggtctac

SEQ ID NO: 8125 - RNA, 20 nt, synthetic construct
  source 1..20: mol_type = other RNA
cctgatttgacagacagatg

SEQ ID NO: 8126 - RNA, 20 nt, synthetic construct
  source 1..20: mol_type = other RNA
cctcatctgtctgtcaaatc

SEQ ID NO: 8127 - RNA, 20 nt, synthetic construct
  source 1..20: mol_type = other RNA
ctcatctgtctgtcaaatca

SEQ ID NO: 8128 - RNA, 20 nt, synthetic construct
  source 1..20: mol_type = other RNA
agtccctgtagggttgtgag

SEQ ID NO: 8129 - RNA, 20 nt, synthetic construct
  source 1..20: mol_type = other RNA
ttagccactcacaaccctac

SEQ ID NO: 8130 - RNA, 20 nt, synthetic construct
  source 1..20: mol_type = other RNA
tagccactcacaaccctaca

SEQ ID NO: 8131 - RNA, 20 nt, synthetic construct
  source 1..20: mol_type = other RNA
gtacaaacgaagtccctgta

SEQ ID NO: 8132 - RNA, 20 nt, synthetic construct
  source 1..20: mol_type = other RNA
tgtacaaacgaagtccctgt

SEQ ID NO: 8133 - RNA, 20 nt, synthetic construct
  source 1..20: mol_type = other RNA
agtggggactgaactgggga

SEQ ID NO: 8134 - RNA, 20 nt, synthetic construct
  source 1..20: mol_type = other RNA
ggtgagtggggactgaactg

SEQ ID NO: 8135 - RNA, 20 nt, synthetic construct
  source 1..20: mol_type = other RNA
aggtgagtggggactgaact

SEQ ID NO: 8136 - RNA, 20 nt, synthetic construct
  source 1..20: mol_type = other RNA
caggtgagtggggactgaac

SEQ ID NO: 8137 - RNA, 20 nt, synthetic construct
  source 1..20: mol_type = other RNA
taagggtgaacaggtgagtg

SEQ ID NO: 8138 - RNA, 20 nt, synthetic construct
  source 1..20: mol_type = other RNA
ataagggtgaacaggtgagt

SEQ ID NO: 8139 - RNA, 20 nt, synthetic construct
  source 1..20: mol_type = other RNA
gataagggtgaacaggtgag

SEQ ID NO: 8140 - RNA, 20 nt, synthetic construct
  source 1..20: mol_type = other RNA
tgtaggagataagggtgaac

SEQ ID NO: 8141 - RNA, 20 nt, synthetic construct
  source 1..20: mol_type = other RNA
ccagcgagtgtaggagataa

SEQ ID NO: 8142 - RNA, 20 nt, synthetic construct
  source 1..20: mol_type = other RNA
cccagcgagtgtaggagata

SEQ ID NO: 8143 - RNA, 20 nt, synthetic construct
  source 1..20: mol_type = other RNA
agagagcacccagcgagtgt

SEQ ID NO: 8144 - RNA, 20 nt, synthetic construct
  source 1..20: mol_type = other RNA
cccttatctcctacactcgc

SEQ ID NO: 8145 - RNA, 20 nt, synthetic construct
  source 1..20: mol_type = other RNA
ccttatctcctacactcgct

SEQ ID NO: 8146 - RNA, 20 nt, synthetic construct
  source 1..20: mol_type = other RNA
aggaggccctgtggctggaa

SEQ ID NO: 8147 - RNA, 20 nt, synthetic construct
  source 1..20: mol_type = other RNA
gctctctccattccagccac

SEQ ID NO: 8148 - RNA, 20 nt, synthetic construct
  source 1..20: mol_type = other RNA
ctctctccattccagccaca

SEQ ID NO: 8149 - RNA, 20 nt, synthetic construct
  source 1..20: mol_type = other RNA
cagcaaggaggccctgtggc

SEQ ID NO: 8150 - RNA, 20 nt, synthetic construct
  source 1..20: mol_type = other RNA
aagccagcaaggaggccctg

SEQ ID NO: 8151 - RNA, 20 nt, synthetic construct
  source 1..20: mol_type = other RNA
cagccacagggcctccttgc

SEQ ID NO: 8152 - RNA, 20 nt, synthetic construct
  source 1..20: mol_type = other RNA
gaggttgaaagccagcaagg

SEQ ID NO: 8153 - RNA, 20 nt, synthetic construct
  source 1..20: mol_type = other RNA
taggaggttgaaagccagca

SEQ ID NO: 8154 - RNA, 20 nt, synthetic construct
  source 1..20: mol_type = other RNA
ttgctggctttcaacctcct

SEQ ID NO: 8155 - RNA, 20 nt, synthetic construct
  source 1..20: mol_type = other RNA
gaggcagaagcatgcctagg

SEQ ID NO: 8156 - RNA, 20 nt, synthetic construct
  source 1..20: mol_type = other RNA
ctggaggcagaagcatgcct

SEQ ID NO: 8157 - RNA, 20 nt, synthetic construct
  source 1..20: mol_type = other RNA
ctaggcatgcttctgcctcc

SEQ ID NO: 8158 - RNA, 20 nt, synthetic construct
  source 1..20: mol_type = other RNA
cagccggtgcaaaggcctgg

SEQ ID NO: 8159 - RNA, 20 nt, synthetic construct
  source 1..20: mol_type = other RNA
gcacagccggtgcaaaggcc

SEQ ID NO: 8160 - RNA, 20 nt, synthetic construct
  source 1..20: mol_type = other RNA
ctgcctccaggcctttgcac

SEQ ID NO: 8161 - RNA, 20 nt, synthetic construct
  source 1..20: mol_type = other RNA
agagggcacagccggtgcaa

SEQ ID NO: 8162 - RNA, 20 nt, synthetic construct
  source 1..20: mol_type = other RNA
ttccaggcagagggcacagc

SEQ ID NO: 8163 - RNA, 20 nt, synthetic construct
  source 1..20: mol_type = other RNA
caccggctgtgccctctgcc

SEQ ID NO: 8164 - RNA, 20 nt, synthetic construct
  source 1..20: mol_type = other RNA
ggagaagtattccaggcaga

SEQ ID NO: 8165 - RNA, 20 nt, synthetic construct
  source 1..20: mol_type = other RNA
gggagaagtattccaggcag

SEQ ID NO: 8166 - RNA, 20 nt, synthetic construct
  source 1..20: mol_type = other RNA
tatctggggagaagtattcc

SEQ ID NO: 8167 - RNA, 20 nt, synthetic construct
  source 1..20: mol_type = other RNA
atgagccatgcagatatctg

SEQ ID NO: 8168 - RNA, 20 nt, synthetic construct
  source 1..20: mol_type = other RNA
catgagccatgcagatatct

SEQ ID NO: 8169 - RNA, 20 nt, synthetic construct
  source 1..20: mol_type = other RNA
gcatgagccatgcagatatc

SEQ ID NO: 8170 - RNA, 20 nt, synthetic construct
  source 1..20: mol_type = other RNA
cttctccccagatatctgca

SEQ ID NO: 8171 - RNA, 20 nt, synthetic construct
  source 1..20: mol_type = other RNA
gtaaagaccagaggaggtga

SEQ ID NO: 8172 - RNA, 20 nt, synthetic construct
  source 1..20: mol_type = other RNA
gctcatgccttcacctcctc

SEQ ID NO: 8173 - RNA, 20 nt, synthetic construct
  source 1..20: mol_type = other RNA
cactgagtaaagaccagagg

SEQ ID NO: 8174 - RNA, 20 nt, synthetic construct
  source 1..20: mol_type = other RNA
cctcactgagtaaagaccag

SEQ ID NO: 8175 - RNA, 20 nt, synthetic construct
  source 1..20: mol_type = other RNA
cctctggtctttactcagtg

SEQ ID NO: 8176 - RNA, 20 nt, synthetic construct
  source 1..20: mol_type = other RNA
agggaaagaaagaaaagaaa

SEQ ID NO: 8177 - RNA, 20 nt, synthetic construct
  source 1..20: mol_type = other RNA
aagaaagaaagaaagaaaca

SEQ ID NO: 8178 - RNA, 20 nt, synthetic construct
  source 1..20: mol_type = other RNA
aaagaaagaaagaaagaaac

SEQ ID NO: 8179 - RNA, 20 nt, synthetic construct
  source 1..20: mol_type = other RNA
ggaaagaaagaaagaaagga

SEQ ID NO: 8180 - RNA, 20 nt, synthetic construct
  source 1..20: mol_type = other RNA
gggaaagaaagaaagaaagg

SEQ ID NO: 8181 - RNA, 20 nt, synthetic construct
  source 1..20: mol_type = other RNA
aaagggaaagaaagaaagaa

SEQ ID NO: 8182 - RNA, 20 nt, synthetic construct
  source 1..20: mol_type = other RNA
aggaaaaagaaagaaagaaa

SEQ ID NO: 8183 - RNA, 20 nt, synthetic construct
  source 1..20: mol_type = other RNA
aaggaaaaagaaagaaagaa

SEQ ID NO: 8184 - RNA, 20 nt, synthetic construct
  source 1..20: mol_type = other RNA
ttctttttctttttttgagg

SEQ ID NO: 8185 - RNA, 20 nt, synthetic construct
  source 1..20: mol_type = other RNA
ggagtctcgctctgtcaccc

SEQ ID NO: 8186 - RNA, 20 nt, synthetic construct
  source 1..20: mol_type = other RNA
tctcgctctgtcacccaggc

SEQ ID NO: 8187 - RNA, 20 nt, synthetic construct
  source 1..20: mol_type = other RNA
gtgccactgcactccagcct

SEQ ID NO: 8188 - RNA, 20 nt, synthetic construct
  source 1..20: mol_type = other RNA
tgtgccactgcactccagcc

SEQ ID NO: 8189 - RNA, 20 nt, synthetic construct
  source 1..20: mol_type = other RNA
tcacccaggctggagtgcag

SEQ ID NO: 8190 - RNA, 20 nt, synthetic construct
  source 1..20: mol_type = other RNA
cacttggacttgggaggagg

SEQ ID NO: 8191 - RNA, 20 nt, synthetic construct
  source 1..20: mol_type = other RNA
aatcacttggacttgggagg

SEQ ID NO: 8192 - RNA, 20 nt, synthetic construct
  source 1..20: mol_type = other RNA
gagaatcacttggacttggg

SEQ ID NO: 8193 - RNA, 20 nt, synthetic construct
  source 1..20: mol_type = other RNA
caagagaatcacttggactt

SEQ ID NO: 8194 - RNA, 20 nt, synthetic construct
  source 1..20: mol_type = other RNA
gcaagagaatcacttggact

SEQ ID NO: 8195 - RNA, 20 nt, synthetic construct
  source 1..20: mol_type = other RNA
gctgaggcaagagaatcact

SEQ ID NO: 8196 - RNA, 20 nt, synthetic construct
  source 1..20: mol_type = other RNA
cccagctactcgggaggctg

SEQ ID NO: 8197 - RNA, 20 nt, synthetic construct
  source 1..20: mol_type = other RNA
tgtagtcccagctactcggg

SEQ ID NO: 8198 - RNA, 20 nt, synthetic construct
  source 1..20: mol_type = other RNA
gcctgtagtcccagctactc

SEQ ID NO: 8199 - RNA, 20 nt, synthetic construct
  source 1..20: mol_type = other RNA
gcctcagcctcccgagtagc

SEQ ID NO: 8200 - RNA, 20 nt, synthetic construct
  source 1..20: mol_type = other RNA
tgcctgtagtcccagctact

SEQ ID NO: 8201 - RNA, 20 nt, synthetic construct
  source 1..20: mol_type = other RNA
cctcagcctcccgagtagct

SEQ ID NO: 8202 - RNA, 20 nt, synthetic construct
  source 1..20: mol_type = other RNA
tcccgagtagctgggactac

SEQ ID NO: 8203 - RNA, 20 nt, synthetic construct
  source 1..20: mol_type = other RNA
caggcacatgtcaccacatc

SEQ ID NO: 8204 - RNA, 20 nt, synthetic construct
  source 1..20: mol_type = other RNA
tacaaaaaattagccagatg

SEQ ID NO: 8205 - RNA, 20 nt, synthetic construct
  source 1..20: mol_type = other RNA
ttttgtatttttagtagaga

SEQ ID NO: 8206 - RNA, 20 nt, synthetic construct
  source 1..20: mol_type = other RNA
tttgtatttttagtagagac

SEQ ID NO: 8207 - RNA, 20 nt, synthetic construct
  source 1..20: mol_type = other RNA
ttgtatttttagtagagacg

SEQ ID NO: 8208 - RNA, 20 nt, synthetic construct
  source 1..20: mol_type = other RNA
tgagaccatcctggctaaca

SEQ ID NO: 8209 - RNA, 20 nt, synthetic construct
  source 1..20: mol_type = other RNA
ggggtttcaccgtgttagcc

SEQ ID NO: 8210 - RNA, 20 nt, synthetic construct
  source 1..20: mol_type = other RNA
tttcaccgtgttagccagga

SEQ ID NO: 8211 - RNA, 20 nt, synthetic construct
  source 1..20: mol_type = other RNA
tcagaagattgagaccatcc

SEQ ID NO: 8212 - RNA, 20 nt, synthetic construct
  source 1..20: mol_type = other RNA
gccgaggtggggggatcacg

SEQ ID NO: 8213 - RNA, 20 nt, synthetic construct
  source 1..20: mol_type = other RNA
ctttgggaggccgaggtggg

SEQ ID NO: 8214 - RNA, 20 nt, synthetic construct
  source 1..20: mol_type = other RNA
acctcgtgatccccccacct

SEQ ID NO: 8215 - RNA, 20 nt, synthetic construct
  source 1..20: mol_type = other RNA
actttgggaggccgaggtgg

SEQ ID NO: 8216 - RNA, 20 nt, synthetic construct
  source 1..20: mol_type = other RNA
cactttgggaggccgaggtg

SEQ ID NO: 8217 - RNA, 20 nt, synthetic construct
  source 1..20: mol_type = other RNA
gcactttgggaggccgaggt

SEQ ID NO: 8218 - RNA, 20 nt, synthetic construct
  source 1..20: mol_type = other RNA
agcactttgggaggccgagg

SEQ ID NO: 8219 - RNA, 20 nt, synthetic construct
  source 1..20: mol_type = other RNA
cccagcactttgggaggccg

SEQ ID NO: 8220 - RNA, 20 nt, synthetic construct
  source 1..20: mol_type = other RNA
tgtaatcccagcactttggg

SEQ ID NO: 8221 - RNA, 20 nt, synthetic construct
  source 1..20: mol_type = other RNA
gcctgtaatcccagcacttt

SEQ ID NO: 8222 - RNA, 20 nt, synthetic construct
  source 1..20: mol_type = other RNA
acctcggcctcccaaagtgc

SEQ ID NO: 8223 - RNA, 20 nt, synthetic construct
  source 1..20: mol_type = other RNA
cgcctgtaatcccagcactt

SEQ ID NO: 8224 - RNA, 20 nt, synthetic construct
  source 1..20: mol_type = other RNA
cctcggcctcccaaagtgct

SEQ ID NO: 8225 - RNA, 20 nt, synthetic construct
  source 1..20: mol_type = other RNA
tcccaaagtgctgggattac

SEQ ID NO: 8226 - RNA, 20 nt, synthetic construct
  source 1..20: mol_type = other RNA
ctcactgaggccgggtgtgg

SEQ ID NO: 8227 - RNA, 20 nt, synthetic construct
  source 1..20: mol_type = other RNA
caggcgtgagccaccacacc

SEQ ID NO: 8228 - RNA, 20 nt, synthetic construct
  source 1..20: mol_type = other RNA
gacctcactgaggccgggtg

SEQ ID NO: 8229 - RNA, 20 nt, synthetic construct
  source 1..20: mol_type = other RNA
gaaaagacctcactgaggcc

SEQ ID NO: 8230 - RNA, 20 nt, synthetic construct
  source 1..20: mol_type = other RNA
agaaaagacctcactgaggc

SEQ ID NO: 8231 - RNA, 20 nt, synthetic construct
  source 1..20: mol_type = other RNA
caccacacccggcctcagtg

SEQ ID NO: 8232 - RNA, 20 nt, synthetic construct
  source 1..20: mol_type = other RNA
ggtcagaaaagacctcactg

SEQ ID NO: 8233 - RNA, 20 nt, synthetic construct
  source 1..20: mol_type = other RNA
agttttatttttaactgtga

SEQ ID NO: 8234 - RNA, 20 nt, synthetic construct
  source 1..20: mol_type = other RNA
gagttttatttttaactgtg

SEQ ID NO: 8235 - RNA, 20 nt, synthetic construct
  source 1..20: mol_type = other RNA
cacagttaaaaataaaactc

SEQ ID NO: 8236 - RNA, 20 nt, synthetic construct
  source 1..20: mol_type = other RNA
ttaaaaataaaactctggcc

SEQ ID NO: 8237 - RNA, 20 nt, synthetic construct
  source 1..20: mol_type = other RNA
caggcataagccactgcgcc

SEQ ID NO: 8238 - RNA, 20 nt, synthetic construct
  source 1..20: mol_type = other RNA
aaaactctggccaggcgcag

SEQ ID NO: 8239 - RNA, 20 nt, synthetic construct
  source 1..20: mol_type = other RNA
tcccaaagtgctgggattac

SEQ ID NO: 8240 - RNA, 20 nt, synthetic construct
  source 1..20: mol_type = other RNA
cctcggcctcccaaagtgct

SEQ ID NO: 8241 - RNA, 20 nt, synthetic construct
  source 1..20: mol_type = other RNA
tgcctgtaatcccagcactt

SEQ ID NO: 8242 - RNA, 20 nt, synthetic construct
  source 1..20: mol_type = other RNA
gcctcggcctcccaaagtgc

SEQ ID NO: 8243 - RNA, 20 nt, synthetic construct
  source 1..20: mol_type = other RNA
gcctgtaatcccagcacttt

SEQ ID NO: 8244 - RNA, 20 nt, synthetic construct
  source 1..20: mol_type = other RNA
tgtaatcccagcactttggg

SEQ ID NO: 8245 - RNA, 20 nt, synthetic construct
  source 1..20: mol_type = other RNA
cccagcactttgggaggccg

SEQ ID NO: 8246 - RNA, 20 nt, synthetic construct
  source 1..20: mol_type = other RNA
gcactttgggaggccgaggc

SEQ ID NO: 8247 - RNA, 20 nt, synthetic construct
  source 1..20: mol_type = other RNA
gccttgtgatccacctgcct

SEQ ID NO: 8248 - RNA, 20 nt, synthetic construct
  source 1..20: mol_type = other RNA
ctttgggaggccgaggcagg

SEQ ID NO: 8249 - RNA, 20 nt, synthetic construct
  source 1..20: mol_type = other RNA
gccgaggcaggtggatcaca

SEQ ID NO: 8250 - RNA, 20 nt, synthetic construct
  source 1..20: mol_type = other RNA
ggcaggtggatcacaaggcc

SEQ ID NO: 8251 - RNA, 20 nt, synthetic construct
  source 1..20: mol_type = other RNA
ccaggctggtctcaaactcc

SEQ ID NO: 8252 - RNA, 20 nt, synthetic construct
  source 1..20: mol_type = other RNA
ccaggagtttgagaccagcc

SEQ ID NO: 8253 - RNA, 20 nt, synthetic construct
  source 1..20: mol_type = other RNA
tttcactatgttggccaggc

SEQ ID NO: 8254 - RNA, 20 nt, synthetic construct
  source 1..20: mol_type = other RNA
ggggtttcactatgttggcc

SEQ ID NO: 8255 - RNA, 20 nt, synthetic construct
  source 1..20: mol_type = other RNA
gagatggggtttcactatgt

SEQ ID NO: 8256 - RNA, 20 nt, synthetic construct
  source 1..20: mol_type = other RNA
ttgtatatttagtagagatg

SEQ ID NO: 8257 - RNA, 20 nt, synthetic construct
  source 1..20: mol_type = other RNA
tttgtatatttagtagagat

SEQ ID NO: 8258 - RNA, 20 nt, synthetic construct
  source 1..20: mol_type = other RNA
ttttgtatatttagtagaga

SEQ ID NO: 8259 - RNA, 20 nt, synthetic construct
  source 1..20: mol_type = other RNA
aatatacaaaacaaattagc

SEQ ID NO: 8260 - RNA, 20 nt, synthetic construct
  source 1..20: mol_type = other RNA
atatacaaaacaaattagct

SEQ ID NO: 8261 - RNA, 20 nt, synthetic construct
  source 1..20: mol_type = other RNA
caaaacaaattagctgggca

SEQ ID NO: 8262 - RNA, 20 nt, synthetic construct
  source 1..20: mol_type = other RNA
aacaaattagctgggcatgg

SEQ ID NO: 8263 - RNA, 20 nt, synthetic construct
  source 1..20: mol_type = other RNA
aattagctgggcatggtggc

SEQ ID NO: 8264 - RNA, 20 nt, synthetic construct
  source 1..20: mol_type = other RNA
tcccaagtagctgtgactac

SEQ ID NO: 8265 - RNA, 20 nt, synthetic construct
  source 1..20: mol_type = other RNA
tgcctgtagtcacagctact

SEQ ID NO: 8266 - RNA, 20 nt, synthetic construct
  source 1..20: mol_type = other RNA
gcctgtagtcacagctactt

SEQ ID NO: 8267 - RNA, 20 nt, synthetic construct
  source 1..20: mol_type = other RNA
tgtagtcacagctacttggg

SEQ ID NO: 8268 - RNA, 20 nt, synthetic construct
  source 1..20: mol_type = other RNA
cacagctacttgggaggctg

SEQ ID NO: 8269 - RNA, 20 nt, synthetic construct
  source 1..20: mol_type = other RNA
gctacttgggaggctgaggc

SEQ ID NO: 8270 - RNA, 20 nt, synthetic construct
  source 1..20: mol_type = other RNA
gcaggagaatcatttgaaac

SEQ ID NO: 8271 - RNA, 20 nt, synthetic construct
  source 1..20: mol_type = other RNA
caggagaatcatttgaaacc

SEQ ID NO: 8272 - RNA, 20 nt, synthetic construct
  source 1..20: mol_type = other RNA
gagaatcatttgaaaccggg

SEQ ID NO: 8273 - RNA, 20 nt, synthetic construct
  source 1..20: mol_type = other RNA
aatcatttgaaaccgggagg

SEQ ID NO: 8274 - RNA, 20 nt, synthetic construct
  source 1..20: mol_type = other RNA
tcaccgcaacctccgcctcc

SEQ ID NO: 8275 - RNA, 20 nt, synthetic construct
  source 1..20: mol_type = other RNA
catttgaaaccgggaggcgg

SEQ ID NO: 8276 - RNA, 20 nt, synthetic construct
  source 1..20: mol_type = other RNA
aaaccgggaggcggaggttg

SEQ ID NO: 8277 - RNA, 20 nt, synthetic construct
  source 1..20: mol_type = other RNA
tcatccaagctggactgcag

SEQ ID NO: 8278 - RNA, 20 nt, synthetic construct
  source 1..20: mol_type = other RNA
cacgccactgcagtccagct

SEQ ID NO: 8279 - RNA, 20 nt, synthetic construct
  source 1..20: mol_type = other RNA
tctcactctgtcatccaagc

SEQ ID NO: 8280 - RNA, 20 nt, synthetic construct
  source 1..20: mol_type = other RNA
atttatttatttttgagatg

SEQ ID NO: 8281 - RNA, 20 nt, synthetic construct
  source 1..20: mol_type = other RNA
tatttatttatttttgagat

SEQ ID NO: 8282 - RNA, 20 nt, synthetic construct
  source 1..20: mol_type = other RNA
ttatttatttatttttgaga

SEQ ID NO: 8283 - RNA, 20 nt, synthetic construct
  source 1..20: mol_type = other RNA
ttttttaaccatgaggggaa

SEQ ID NO: 8284 - RNA, 20 nt, synthetic construct
  source 1..20: mol_type = other RNA
atagaactccattcccctca

SEQ ID NO: 8285 - RNA, 20 nt, synthetic construct
  source 1..20: mol_type = other RNA
gttttttttttaaccatgag

SEQ ID NO: 8286 - RNA, 20 nt, synthetic construct
  source 1..20: mol_type = other RNA
agttttttttttaaccatga

SEQ ID NO: 8287 - RNA, 20 nt, synthetic construct
  source 1..20: mol_type = other RNA
gagttttttttttaaccatg

SEQ ID NO: 8288 - RNA, 20 nt, synthetic construct
  source 1..20: mol_type = other RNA
atatacagtggtgaggggga

SEQ ID NO: 8289 - RNA, 20 nt, synthetic construct
  source 1..20: mol_type = other RNA
ggaaatatacagtggtgagg

SEQ ID NO: 8290 - RNA, 20 nt, synthetic construct
  source 1..20: mol_type = other RNA
tggaaatatacagtggtgag

SEQ ID NO: 8291 - RNA, 20 nt, synthetic construct
  source 1..20: mol_type = other RNA
atggaaatatacagtggtga

SEQ ID NO: 8292 - RNA, 20 nt, synthetic construct
  source 1..20: mol_type = other RNA
tatggaaatatacagtggtg

SEQ ID NO: 8293 - RNA, 20 nt, synthetic construct
  source 1..20: mol_type = other RNA
aatcatatggaaatatacag

SEQ ID NO: 8294 - RNA, 20 nt, synthetic construct
  source 1..20: mol_type = other RNA
gtctgagacaatgaatcata

SEQ ID NO: 8295 - RNA, 20 nt, synthetic construct
  source 1..20: mol_type = other RNA
agacagataatcaaagaaat

SEQ ID NO: 8296 - RNA, 20 nt, synthetic construct
  source 1..20: mol_type = other RNA
tatctgtctatcttcccccc

SEQ ID NO: 8297 - RNA, 20 nt, synthetic construct
  source 1..20: mol_type = other RNA
tgggtgctgacattccaggg

SEQ ID NO: 8298 - RNA, 20 nt, synthetic construct
  source 1..20: mol_type = other RNA
ctgggtgctgacattccagg

SEQ ID NO: 8299 - RNA, 20 nt, synthetic construct
  source 1..20: mol_type = other RNA
tctgggtgctgacattccag

SEQ ID NO: 8300 - RNA, 20 nt, synthetic construct
  source 1..20: mol_type = other RNA
ttctgggtgctgacattcca

SEQ ID NO: 8301 - RNA, 20 nt, synthetic construct
  source 1..20: mol_type = other RNA
cttctgggtgctgacattcc

SEQ ID NO: 8302 - RNA, 20 nt, synthetic construct
  source 1..20: mol_type = other RNA
ctggaatgtcagcacccaga

SEQ ID NO: 8303 - RNA, 20 nt, synthetic construct
  source 1..20: mol_type = other RNA
gacgaaaatccctgccttct

SEQ ID NO: 8304 - RNA, 20 nt, synthetic construct
  source 1..20: mol_type = other RNA
aatgtcagcacccagaaggc

SEQ ID NO: 8305 - RNA, 20 nt, synthetic construct
  source 1..20: mol_type = other RNA
agacgaaaatccctgccttc

SEQ ID NO: 8306 - RNA, 20 nt, synthetic construct
  source 1..20: mol_type = other RNA
atgtcagcacccagaaggca

SEQ ID NO: 8307 - RNA, 20 nt, synthetic construct
  source 1..20: mol_type = other RNA
ggcagggattttcgtctgtt

SEQ ID NO: 8308 - RNA, 20 nt, synthetic construct
  source 1..20: mol_type = other RNA
ggcccagggaggaaagttgt

SEQ ID NO: 8309 - RNA, 20 nt, synthetic construct
  source 1..20: mol_type = other RNA
aggcccagggaggaaagttg

SEQ ID NO: 8310 - RNA, 20 nt, synthetic construct
  source 1..20: mol_type = other RNA
tggcccacaactttcctccc

SEQ ID NO: 8311 - RNA, 20 nt, synthetic construct
  source 1..20: mol_type = other RNA
ggcccacaactttcctccct

SEQ ID NO: 8312 - RNA, 20 nt, synthetic construct
  source 1..20: mol_type = other RNA
actatgtgccaggcccaggg

SEQ ID NO: 8313 - RNA, 20 nt, synthetic construct
  source 1..20: mol_type = other RNA
acaactttcctccctgggcc

SEQ ID NO: 8314 - RNA, 20 nt, synthetic construct
  source 1..20: mol_type = other RNA
cctactatgtgccaggccca

SEQ ID NO: 8315 - RNA, 20 nt, synthetic construct
  source 1..20: mol_type = other RNA
gcctactatgtgccaggccc

SEQ ID NO: 8316 - RNA, 20 nt, synthetic construct
  source 1..20: mol_type = other RNA
ccgcttgcctactatgtgcc

SEQ ID NO: 8317 - RNA, 20 nt, synthetic construct
  source 1..20: mol_type = other RNA
ccctgggcctggcacatagt

SEQ ID NO: 8318 - RNA, 20 nt, synthetic construct
  source 1..20: mol_type = other RNA
cctggcacatagtaggcaag

SEQ ID NO: 8319 - RNA, 20 nt, synthetic construct
  source 1..20: mol_type = other RNA
ttatgggggttcttggatta

SEQ ID NO: 8320 - RNA, 20 nt, synthetic construct
  source 1..20: mol_type = other RNA
cccaatcttatgggggttct

SEQ ID NO: 8321 - RNA, 20 nt, synthetic construct
  source 1..20: mol_type = other RNA
atttcaccccaatcttatgg

SEQ ID NO: 8322 - RNA, 20 nt, synthetic construct
  source 1..20: mol_type = other RNA
tatttcaccccaatcttatg

SEQ ID NO: 8323 - RNA, 20 nt, synthetic construct
  source 1..20: mol_type = other RNA
atatttcaccccaatcttat

SEQ ID NO: 8324 - RNA, 20 nt, synthetic construct
  source 1..20: mol_type = other RNA
tccaagaacccccataagat

SEQ ID NO: 8325 - RNA, 20 nt, synthetic construct
  source 1..20: mol_type = other RNA
aatatttcaccccaatctta

SEQ ID NO: 8326 - RNA, 20 nt, synthetic construct
  source 1..20: mol_type = other RNA
ccaagaacccccataagatt

SEQ ID NO: 8327 - RNA, 20 nt, synthetic construct
  source 1..20: mol_type = other RNA
caagaacccccataagattg

SEQ ID NO: 8328 - RNA, 20 nt, synthetic construct
  source 1..20: mol_type = other RNA
agattggggtgaaatatttg

SEQ ID NO: 8329 - RNA, 20 nt, synthetic construct
  source 1..20: mol_type = other RNA
tttgaggagatcaagactta

SEQ ID NO: 8330 - RNA, 20 nt, synthetic construct
  source 1..20: mol_type = other RNA
ttgaggagatcaagacttaa

SEQ ID NO: 8331 - RNA, 20 nt, synthetic construct
  source 1..20: mol_type = other RNA
agatcaagacttaagggtga

SEQ ID NO: 8332 - RNA, 20 nt, synthetic construct
  source 1..20: mol_type = other RNA
gatcaagacttaagggtgaa

SEQ ID NO: 8333 - RNA, 20 nt, synthetic construct
  source 1..20: mol_type = other RNA
aagggtgaagggatttgcca

SEQ ID NO: 8334 - RNA, 20 nt, synthetic construct
  source 1..20: mol_type = other RNA
tggctccctgctaaaggcct

SEQ ID NO: 8335 - RNA, 20 nt, synthetic construct
  source 1..20: mol_type = other RNA
gatttgccaaggcctttagc

SEQ ID NO: 8336 - RNA, 20 nt, synthetic construct
  source 1..20: mol_type = other RNA
atttgccaaggcctttagca

SEQ ID NO: 8337 - RNA, 20 nt, synthetic construct
  source 1..20: mol_type = other RNA
ggcatttggctccctgctaa

SEQ ID NO: 8338 - RNA, 20 nt, synthetic construct
  source 1..20: mol_type = other RNA
tgactccaggatctggcatt

SEQ ID NO: 8339 - RNA, 20 nt, synthetic construct
  source 1..20: mol_type = other RNA
gggagccaaatgccagatcc

SEQ ID NO: 8340 - RNA, 20 nt, synthetic construct
  source 1..20: mol_type = other RNA
cagagtttgactccaggatc

SEQ ID NO: 8341 - RNA, 20 nt, synthetic construct
  source 1..20: mol_type = other RNA
caggatcagagtttgactcc

SEQ ID NO: 8342 - RNA, 20 nt, synthetic construct
  source 1..20: mol_type = other RNA
ggagtcaaactctgatcctg

SEQ ID NO: 8343 - RNA, 20 nt, synthetic construct
  source 1..20: mol_type = other RNA
tggcctcagcaaaaggccac

SEQ ID NO: 8344 - RNA, 20 nt, synthetic construct
  source 1..20: mol_type = other RNA
agaacactggcctcagcaaa

SEQ ID NO: 8345 - RNA, 20 nt, synthetic construct
  source 1..20: mol_type = other RNA
gatcctgtggccttttgctg

SEQ ID NO: 8346 - RNA, 20 nt, synthetic construct
  source 1..20: mol_type = other RNA
atcctgaagtctgagaacac

SEQ ID NO: 8347 - RNA, 20 nt, synthetic construct
  source 1..20: mol_type = other RNA
ggccagtgttctcagacttc

SEQ ID NO: 8348 - RNA, 20 nt, synthetic construct
  source 1..20: mol_type = other RNA
ctcagacttcaggatttcag

SEQ ID NO: 8349 - RNA, 20 nt, synthetic construct
  source 1..20: mol_type = other RNA
aattcattccgaaatgttct

SEQ ID NO: 8350 - RNA, 20 nt, synthetic construct
  source 1..20: mol_type = other RNA
ttcagaggccgagaacattt

SEQ ID NO: 8351 - RNA, 20 nt, synthetic construct
  source 1..20: mol_type = other RNA
tgaattcgagtgaccgtgcg

SEQ ID NO: 8352 - RNA, 20 nt, synthetic construct
  source 1..20: mol_type = other RNA
taaaaaacagtaaccgcgca

SEQ ID NO: 8353 - RNA, 20 nt, synthetic construct
  source 1..20: mol_type = other RNA
ctgttttttaatgtttatca

SEQ ID NO: 8354 - RNA, 20 nt, synthetic construct
  source 1..20: mol_type = other RNA
aacaacaaaatacccactgc

SEQ ID NO: 8355 - RNA, 20 nt, synthetic construct
  source 1..20: mol_type = other RNA
aaaattatggtgccagcagt

SEQ ID NO: 8356 - RNA, 20 nt, synthetic construct
  source 1..20: mol_type = other RNA
taaaattatggtgccagcag

SEQ ID NO: 8357 - RNA, 20 nt, synthetic construct
  source 1..20: mol_type = other RNA
atcattctttggtaaaatta

SEQ ID NO: 8358 - RNA, 20 nt, synthetic construct
  source 1..20: mol_type = other RNA
atattagaatgatcattctt

SEQ ID NO: 8359 - RNA, 20 nt, synthetic construct
  source 1..20: mol_type = other RNA
ctaatattgaaaaagttcaa

SEQ ID NO: 8360 - RNA, 20 nt, synthetic construct
  source 1..20: mol_type = other RNA
ataaaagacagctctttata

SEQ ID NO: 8361 - RNA, 20 nt, synthetic construct
  source 1..20: mol_type = other RNA
ggccgtttagtttaaaaata

SEQ ID NO: 8362 - RNA, 20 nt, synthetic construct
  source 1..20: mol_type = other RNA
aaccatatttttaaactaaa

SEQ ID NO: 8363 - RNA, 20 nt, synthetic construct
  source 1..20: mol_type = other RNA
agaaaaataaggacaacgaa

SEQ ID NO: 8364 - RNA, 20 nt, synthetic construct
  source 1..20: mol_type = other RNA
gagaaaaataaggacaacga

SEQ ID NO: 8365 - RNA, 20 nt, synthetic construct
  source 1..20: mol_type = other RNA
tcaaggggatgagaaaaata

SEQ ID NO: 8366 - RNA, 20 nt, synthetic construct
  source 1..20: mol_type = other RNA
catttagagcagacttcaag

SEQ ID NO: 8367 - RNA, 20 nt, synthetic construct
  source 1..20: mol_type = other RNA
acatttagagcagacttcaa

SEQ ID NO: 8368 - RNA, 20 nt, synthetic construct
  source 1..20: mol_type = other RNA
aacatttagagcagacttca

SEQ ID NO: 8369 - RNA, 20 nt, synthetic construct
  source 1..20: mol_type = other RNA
tctgctctaaatgttgatcc

SEQ ID NO: 8370 - RNA, 20 nt, synthetic construct
  source 1..20: mol_type = other RNA
tcacacagggtcacacagcc

SEQ ID NO: 8371 - RNA, 20 nt, synthetic construct
  source 1..20: mol_type = other RNA
gcgatcaaatagctcacaca

SEQ ID NO: 8372 - RNA, 20 nt, synthetic construct
  source 1..20: mol_type = other RNA
ggcgatcaaatagctcacac

SEQ ID NO: 8373 - RNA, 20 nt, synthetic construct
  source 1..20: mol_type = other RNA
tatagggaaactgaggcact

SEQ ID NO: 8374 - RNA, 20 nt, synthetic construct
  source 1..20: mol_type = other RNA
ttttacatatagggaaactg

SEQ ID NO: 8375 - RNA, 20 nt, synthetic construct
  source 1..20: mol_type = other RNA
ttatctccattttacatata

SEQ ID NO: 8376 - RNA, 20 nt, synthetic construct
  source 1..20: mol_type = other RNA
cttatctccattttacatat

SEQ ID NO: 8377 - RNA, 20 nt, synthetic construct
  source 1..20: mol_type = other RNA
cagtttccctatatgtaaaa

SEQ ID NO: 8378 - RNA, 20 nt, synthetic construct
  source 1..20: mol_type = other RNA
tcctcaagactctgagctat

SEQ ID NO: 8379 - RNA, 20 nt, synthetic construct
  source 1..20: mol_type = other RNA
ctcctcaagactctgagcta

SEQ ID NO: 8380 - RNA, 20 nt, synthetic construct
  source 1..20: mol_type = other RNA
gcccatagctcagagtcttg

SEQ ID NO: 8381 - RNA, 20 nt, synthetic construct
  source 1..20: mol_type = other RNA
ttgaggagtaaatgagatct

SEQ ID NO: 8382 - RNA, 20 nt, synthetic construct
  source 1..20: mol_type = other RNA
agtaaatgagatctaggccg

SEQ ID NO: 8383 - RNA, 20 nt, synthetic construct
  source 1..20: mol_type = other RNA
gtaaatgagatctaggccga

SEQ ID NO: 8384 - RNA, 20 nt, synthetic construct
  source 1..20: mol_type = other RNA
atgagatctaggccgaggga

SEQ ID NO: 8385 - RNA, 20 nt, synthetic construct
  source 1..20: mol_type = other RNA
tgagatctaggccgagggaa

SEQ ID NO: 8386 - RNA, 20 nt, synthetic construct
  source 1..20: mol_type = other RNA
ggcatgctaggcccttccct

SEQ ID NO: 8387 - RNA, 20 nt, synthetic construct
  source 1..20: mol_type = other RNA
ttataagccaggggcatgct

SEQ ID NO: 8388 - RNA, 20 nt, synthetic construct
  source 1..20: mol_type = other RNA
ggaagggcctagcatgcccc

SEQ ID NO: 8389 - RNA, 20 nt, synthetic construct
  source 1..20: mol_type = other RNA
gagcatttattataagccag

SEQ ID NO: 8390 - RNA, 20 nt, synthetic construct
  source 1..20: mol_type = other RNA
tgagcatttattataagcca

SEQ ID NO: 8391 - RNA, 20 nt, synthetic construct
  source 1..20: mol_type = other RNA
ttgagcatttattataagcc

SEQ ID NO: 8392 - RNA, 20 nt, synthetic construct
  source 1..20: mol_type = other RNA
tataataaatgctcaacaaa

SEQ ID NO: 8393 - RNA, 20 nt, synthetic construct
  source 1..20: mol_type = other RNA
ctttgcattttaataacaaa

SEQ ID NO: 8394 - RNA, 20 nt, synthetic construct
  source 1..20: mol_type = other RNA
cttttgttattaaaatgcaa

SEQ ID NO: 8395 - RNA, 20 nt, synthetic construct
  source 1..20: mol_type = other RNA
aggcatattagtcaaccacc

SEQ ID NO: 8396 - RNA, 20 nt, synthetic construct
  source 1..20: mol_type = other RNA
actgccagtggtaaaccagg

SEQ ID NO: 8397 - RNA, 20 nt, synthetic construct
  source 1..20: mol_type = other RNA
accactgccagtggtaaacc

SEQ ID NO: 8398 - RNA, 20 nt, synthetic construct
  source 1..20: mol_type = other RNA
tcaaccacctggtttaccac

SEQ ID NO: 8399 - RNA, 20 nt, synthetic construct
  source 1..20: mol_type = other RNA
cagctgacgaccactgccag

SEQ ID NO: 8400 - RNA, 20 nt, synthetic construct
  source 1..20: mol_type = other RNA
acctggtttaccactggcag

SEQ ID NO: 8401 - RNA, 20 nt, synthetic construct
  source 1..20: mol_type = other RNA
cactggcagtggtcgtcagc

SEQ ID NO: 8402 - RNA, 20 nt, synthetic construct
  source 1..20: mol_type = other RNA
tggtcgtcagctggcatttc

SEQ ID NO: 8403 - RNA, 20 nt, synthetic construct
  source 1..20: mol_type = other RNA
cccgccgcagcctggggaag

SEQ ID NO: 8404 - RNA, 20 nt, synthetic construct
  source 1..20: mol_type = other RNA
catttcaggaccccttcccc

SEQ ID NO: 8405 - RNA, 20 nt, synthetic construct
  source 1..20: mol_type = other RNA
tcccgccgcagcctggggaa

SEQ ID NO: 8406 - RNA, 20 nt, synthetic construct
  source 1..20: mol_type = other RNA
ctcccgccgcagcctgggga

SEQ ID NO: 8407 - RNA, 20 nt, synthetic construct
  source 1..20: mol_type = other RNA
ccttctcccgccgcagcctg

SEQ ID NO: 8408 - RNA, 20 nt, synthetic construct
  source 1..20: mol_type = other RNA
aggaccccttccccaggctg

SEQ ID NO: 8409 - RNA, 20 nt, synthetic construct
  source 1..20: mol_type = other RNA
cccttctcccgccgcagcct

SEQ ID NO: 8410 - RNA, 20 nt, synthetic construct
  source 1..20: mol_type = other RNA
acccttctcccgccgcagcc

SEQ ID NO: 8411 - RNA, 20 nt, synthetic construct
  source 1..20: mol_type = other RNA
accccttccccaggctgcgg

SEQ ID NO: 8412 - RNA, 20 nt, synthetic construct
  source 1..20: mol_type = other RNA
ccccttccccaggctgcggc

SEQ ID NO: 8413 - RNA, 20 nt, synthetic construct
  source 1..20: mol_type = other RNA
ccccaggctgcggcgggaga

SEQ ID NO: 8414 - RNA, 20 nt, synthetic construct
  source 1..20: mol_type = other RNA
cccaggctgcggcgggagaa

SEQ ID NO: 8415 - RNA, 20 nt, synthetic construct
  source 1..20: mol_type = other RNA
cggcgggagaagggtatctg

SEQ ID NO: 8416 - RNA, 20 nt, synthetic construct
  source 1..20: mol_type = other RNA
agaagggtatctgtggatgt

SEQ ID NO: 8417 - RNA, 20 nt, synthetic construct
  source 1..20: mol_type = other RNA
gaagggtatctgtggatgtt

SEQ ID NO: 8418 - RNA, 20 nt, synthetic construct
  source 1..20: mol_type = other RNA
atgttgggaagagtaagaac

SEQ ID NO: 8419 - RNA, 20 nt, synthetic construct
  source 1..20: mol_type = other RNA
ccagcttttgtctctaagta

SEQ ID NO: 8420 - RNA, 20 nt, synthetic construct
  source 1..20: mol_type = other RNA
cccagcttttgtctctaagt

SEQ ID NO: 8421 - RNA, 20 nt, synthetic construct
  source 1..20: mol_type = other RNA
ccctacttagagacaaaagc

SEQ ID NO: 8422 - RNA, 20 nt, synthetic construct
  source 1..20: mol_type = other RNA
cctacttagagacaaaagct

SEQ ID NO: 8423 - RNA, 20 nt, synthetic construct
  source 1..20: mol_type = other RNA
ctacttagagacaaaagctg

SEQ ID NO: 8424 - RNA, 20 nt, synthetic construct
  source 1..20: mol_type = other RNA
aaagctggggagccccaaga

SEQ ID NO: 8425 - RNA, 20 nt, synthetic construct
  source 1..20: mol_type = other RNA
aagctggggagccccaagat

SEQ ID NO: 8426 - RNA, 20 nt, synthetic construct
  source 1..20: mol_type = other RNA
taagttgggctcccatcttg

SEQ ID NO: 8427 - RNA, 20 nt, synthetic construct
  source 1..20: mol_type = other RNA
gtaagttgggctcccatctt

SEQ ID NO: 8428 - RNA, 20 nt, synthetic construct
  source 1..20: mol_type = other RNA
ggtaagttgggctcccatct

SEQ ID NO: 8429 - RNA, 20 nt, synthetic construct
  source 1..20: mol_type = other RNA
aaaagaaaaagaggtaagtt

SEQ ID NO: 8430 - RNA, 20 nt, synthetic construct
  source 1..20: mol_type = other RNA
gaaaagaaaaagaggtaagt

SEQ ID NO: 8431 - RNA, 20 nt, synthetic construct
  source 1..20: mol_type = other RNA
caaaaaaagaaaagaaaaag

SEQ ID NO: 8432 - RNA, 20 nt, synthetic construct
  source 1..20: mol_type = other RNA
ttttttttcttttttgagac

SEQ ID NO: 8433 - RNA, 20 nt, synthetic construct
  source 1..20: mol_type = other RNA
tttttttcttttttgagaca

SEQ ID NO: 8434 - RNA, 20 nt, synthetic construct
  source 1..20: mol_type = other RNA
acagggtctcgctcttaccc

SEQ ID NO: 8435 - RNA, 20 nt, synthetic construct
  source 1..20: mol_type = other RNA
ggtctcgctcttacccaggc

SEQ ID NO: 8436 - RNA, 20 nt, synthetic construct
  source 1..20: mol_type = other RNA
acaccactgcactccagcct

SEQ ID NO: 8437 - RNA, 20 nt, synthetic construct
  source 1..20: mol_type = other RNA
cacaccactgcactccagcc

SEQ ID NO: 8438 - RNA, 20 nt, synthetic construct
  source 1..20: mol_type = other RNA
ttacccaggctggagtgcag

SEQ ID NO: 8439 - RNA, 20 nt, synthetic construct
  source 1..20: mol_type = other RNA
ggagtgcagtggtgtgatca

SEQ ID NO: 8440 - RNA, 20 nt, synthetic construct
  source 1..20: mol_type = other RNA
cgcttgagcccaggaggtgg

SEQ ID NO: 8441 - RNA, 20 nt, synthetic construct
  source 1..20: mol_type = other RNA
tcactgcatcctccacctcc

SEQ ID NO: 8442 - RNA, 20 nt, synthetic construct
  source 1..20: mol_type = other RNA
cactgcatcctccacctcct

SEQ ID NO: 8443 - RNA, 20 nt, synthetic construct
  source 1..20: mol_type = other RNA
catcgcttgagcccaggagg

SEQ ID NO: 8444 - RNA, 20 nt, synthetic construct
  source 1..20: mol_type = other RNA
aagcatcgcttgagcccagg

SEQ ID NO: 8445 - RNA, 20 nt, synthetic construct
  source 1..20: mol_type = other RNA
tggaagcatcgcttgagccc

SEQ ID NO: 8446 - RNA, 20 nt, synthetic construct
  source 1..20: mol_type = other RNA
agcttcttaggaggctgagg

SEQ ID NO: 8447 - RNA, 20 nt, synthetic construct
  source 1..20: mol_type = other RNA
ctcagcttcttaggaggctg

SEQ ID NO: 8448 - RNA, 20 nt, synthetic construct
  source 1..20: mol_type = other RNA
tgtggtctcagcttcttagg

SEQ ID NO: 8449 - RNA, 20 nt, synthetic construct
  source 1..20: mol_type = other RNA
tcctgtggtctcagcttctt

SEQ ID NO: 8450 - RNA, 20 nt, synthetic construct
  source 1..20: mol_type = other RNA
tcctaagaagctgagaccac

SEQ ID NO: 8451 - RNA, 20 nt, synthetic construct
  source 1..20: mol_type = other RNA
aagtgtggtggtgtgtcctg

SEQ ID NO: 8452 - RNA, 20 nt, synthetic construct
  source 1..20: mol_type = other RNA
caataattagccaagtgtgg

SEQ ID NO: 8453 - RNA, 20 nt, synthetic construct
  source 1..20: mol_type = other RNA
acaggacacaccaccacact

SEQ ID NO: 8454 - RNA, 20 nt, synthetic construct
  source 1..20: mol_type = other RNA
acacaataattagccaagtg

SEQ ID NO: 8455 - RNA, 20 nt, synthetic construct
  source 1..20: mol_type = other RNA
tctcactatgttgcccaagc

SEQ ID NO: 8456 - RNA, 20 nt, synthetic construct
  source 1..20: mol_type = other RNA
caggagttcaagaccagctt

SEQ ID NO: 8457 - RNA, 20 nt, synthetic construct
  source 1..20: mol_type = other RNA
ccaggagttcaagaccagct

SEQ ID NO: 8458 - RNA, 20 nt, synthetic construct
  source 1..20: mol_type = other RNA
ccaagctggtcttgaactcc

SEQ ID NO: 8459 - RNA, 20 nt, synthetic construct
  source 1..20: mol_type = other RNA
caagctggtcttgaactcct

SEQ ID NO: 8460 - RNA, 20 nt, synthetic construct
  source 1..20: mol_type = other RNA
taagaggactgcttgagccc

SEQ ID NO: 8461 - RNA, 20 nt, synthetic construct
  source 1..20: mol_type = other RNA
ttttgggaggccaaggtaag

SEQ ID NO: 8462 - RNA, 20 nt, synthetic construct
  source 1..20: mol_type = other RNA
ctcaagcagtcctcttacct

SEQ ID NO: 8463 - RNA, 20 nt, synthetic construct
  source 1..20: mol_type = other RNA
tccagcattttgggaggcca

SEQ ID NO: 8464 - RNA, 20 nt, synthetic construct
  source 1..20: mol_type = other RNA
tgtaattccagcattttggg

SEQ ID NO: 8465 - RNA, 20 nt, synthetic construct
  source 1..20: mol_type = other RNA
gtctgtaattccagcatttt

SEQ ID NO: 8466 - RNA, 20 nt, synthetic construct
  source 1..20: mol_type = other RNA
accttggcctcccaaaatgc

SEQ ID NO: 8467 - RNA, 20 nt, synthetic construct
  source 1..20: mol_type = other RNA
tgtctgtaattccagcattt

SEQ ID NO: 8468 - RNA, 20 nt, synthetic construct
  source 1..20: mol_type = other RNA
ccagttgaggctgggaacag

SEQ ID NO: 8469 - RNA, 20 nt, synthetic construct
  source 1..20: mol_type = other RNA
ataagaggccagttgaggct

SEQ ID NO: 8470 - RNA, 20 nt, synthetic construct
  source 1..20: mol_type = other RNA
cataagaggccagttgaggc

SEQ ID NO: 8471 - RNA, 20 nt, synthetic construct
  source 1..20: mol_type = other RNA
ccactgttcccagcctcaac

SEQ ID NO: 8472 - RNA, 20 nt, synthetic construct
  source 1..20: mol_type = other RNA
cccccataagaggccagttg

SEQ ID NO: 8473 - RNA, 20 nt, synthetic construct
  source 1..20: mol_type = other RNA
cagcctcaactggcctctta

SEQ ID NO: 8474 - RNA, 20 nt, synthetic construct
  source 1..20: mol_type = other RNA
agcctcaactggcctcttat

SEQ ID NO: 8475 - RNA, 20 nt, synthetic construct
  source 1..20: mol_type = other RNA
gcctcaactggcctcttatg

SEQ ID NO: 8476 - RNA, 20 nt, synthetic construct
  source 1..20: mol_type = other RNA
atttcatagccccccataag

SEQ ID NO: 8477 - RNA, 20 nt, synthetic construct
  source 1..20: mol_type = other RNA
cctcaactggcctcttatgg

SEQ ID NO: 8478 - RNA, 20 nt, synthetic construct
  source 1..20: mol_type = other RNA
ctcaactggcctcttatggg

SEQ ID NO: 8479 - RNA, 20 nt, synthetic construct
  source 1..20: mol_type = other RNA
accccaatcttttctgcttg

SEQ ID NO: 8480 - RNA, 20 nt, synthetic construct
  source 1..20: mol_type = other RNA
gaccccaatcttttctgctt

SEQ ID NO: 8481 - RNA, 20 nt, synthetic construct
  source 1..20: mol_type = other RNA
ggaccccaatcttttctgct

SEQ ID NO: 8482 - RNA, 20 nt, synthetic construct
  source 1..20: mol_type = other RNA
ctaccccaagcagaaaagat

SEQ ID NO: 8483 - RNA, 20 nt, synthetic construct
  source 1..20: mol_type = other RNA
taccccaagcagaaaagatt

SEQ ID NO: 8484 - RNA, 20 nt, synthetic construct
  source 1..20: mol_type = other RNA
accccaagcagaaaagattg

SEQ ID NO: 8485 - RNA, 20 nt, synthetic construct
  source 1..20: mol_type = other RNA
gaaaagattggggtcctacg

SEQ ID NO: 8486 - RNA, 20 nt, synthetic construct
  source 1..20: mol_type = other RNA
tccctgcaacccttccacgt

SEQ ID NO: 8487 - RNA, 20 nt, synthetic construct
  source 1..20: mol_type = other RNA
agattggggtcctacgtgga

SEQ ID NO: 8488 - RNA, 20 nt, synthetic construct
  source 1..20: mol_type = other RNA
gattggggtcctacgtggaa

SEQ ID NO: 8489 - RNA, 20 nt, synthetic construct
  source 1..20: mol_type = other RNA
gtcctacgtggaagggttgc

SEQ ID NO: 8490 - RNA, 20 nt, synthetic construct
  source 1..20: mol_type = other RNA
tcctacgtggaagggttgca

SEQ ID NO: 8491 - RNA, 20 nt, synthetic construct
  source 1..20: mol_type = other RNA
aagggttgcagggacctaag

SEQ ID NO: 8492 - RNA, 20 nt, synthetic construct
  source 1..20: mol_type = other RNA
cccttccaccccagcctctt

SEQ ID NO: 8493 - RNA, 20 nt, synthetic construct
  source 1..20: mol_type = other RNA
gttgcagggacctaagaggc

SEQ ID NO: 8494 - RNA, 20 nt, synthetic construct
  source 1..20: mol_type = other RNA
ttgcagggacctaagaggct

SEQ ID NO: 8495 - RNA, 20 nt, synthetic construct
  source 1..20: mol_type = other RNA
tgcagggacctaagaggctg

SEQ ID NO: 8496 - RNA, 20 nt, synthetic construct
  source 1..20: mol_type = other RNA
agggacctaagaggctgggg

SEQ ID NO: 8497 - RNA, 20 nt, synthetic construct
  source 1..20: mol_type = other RNA
acctaagaggctggggtgga

SEQ ID NO: 8498 - RNA, 20 nt, synthetic construct
  source 1..20: mol_type = other RNA
cctaagaggctggggtggaa

SEQ ID NO: 8499 - RNA, 20 nt, synthetic construct
  source 1..20: mol_type = other RNA
aggctggggtggaagggaag

SEQ ID NO: 8500 - RNA, 20 nt, synthetic construct
  source 1..20: mol_type = other RNA
ctggggtggaagggaagagg

SEQ ID NO: 8501 - RNA, 20 nt, synthetic construct
  source 1..20: mol_type = other RNA
tggggtggaagggaagagga

SEQ ID NO: 8502 - RNA, 20 nt, synthetic construct
  source 1..20: mol_type = other RNA
ggggtggaagggaagaggag

SEQ ID NO: 8503 - RNA, 20 nt, synthetic construct
  source 1..20: mol_type = other RNA
gaagaggaggggcctcagac

SEQ ID NO: 8504 - RNA, 20 nt, synthetic construct
  source 1..20: mol_type = other RNA
cagaagtcaggtcctgtctg

SEQ ID NO: 8505 - RNA, 20 nt, synthetic construct
  source 1..20: mol_type = other RNA
agagacaaggcacagaagtc

SEQ ID NO: 8506 - RNA, 20 nt, synthetic construct
  source 1..20: mol_type = other RNA
cccagggtggggcagagaca

SEQ ID NO: 8507 - RNA, 20 nt, synthetic construct
  source 1..20: mol_type = other RNA
gccttgtctctgccccaccc

SEQ ID NO: 8508 - RNA, 20 nt, synthetic construct
  source 1..20: mol_type = other RNA
ccttgtctctgccccaccct

SEQ ID NO: 8509 - RNA, 20 nt, synthetic construct
  source 1..20: mol_type = other RNA
cctcattcagccccagggtg

SEQ ID NO: 8510 - RNA, 20 nt, synthetic construct
  source 1..20: mol_type = other RNA
cttgtctctgccccaccctg

SEQ ID NO: 8511 - RNA, 20 nt, synthetic construct
  source 1..20: mol_type = other RNA
ccctcattcagccccagggt

SEQ ID NO: 8512 - RNA, 20 nt, synthetic construct
  source 1..20: mol_type = other RNA
cccctcattcagccccaggg

SEQ ID NO: 8513 - RNA, 20 nt, synthetic construct
  source 1..20: mol_type = other RNA
cagcccctcattcagcccca

SEQ ID NO: 8514 - RNA, 20 nt, synthetic construct
  source 1..20: mol_type = other RNA
acagcccctcattcagcccc

SEQ ID NO: 8515 - RNA, 20 nt, synthetic construct
  source 1..20: mol_type = other RNA
ccccaccctggggctgaatg

SEQ ID NO: 8516 - RNA, 20 nt, synthetic construct
  source 1..20: mol_type = other RNA
cccaccctggggctgaatga

SEQ ID NO: 8517 - RNA, 20 nt, synthetic construct
  source 1..20: mol_type = other RNA
ccaccctggggctgaatgag

SEQ ID NO: 8518 - RNA, 20 nt, synthetic construct
  source 1..20: mol_type = other RNA
tgaggggctgtgactgtgac

SEQ ID NO: 8519 - RNA, 20 nt, synthetic construct
  source 1..20: mol_type = other RNA
ggggctgtgactgtgactgg

SEQ ID NO: 8520 - RNA, 20 nt, synthetic construct
  source 1..20: mol_type = other RNA
gcctaggaggcaaagagcaa

SEQ ID NO: 8521 - RNA, 20 nt, synthetic construct
  source 1..20: mol_type = other RNA
agcctaggaggcaaagagca

SEQ ID NO: 8522 - RNA, 20 nt, synthetic construct
  source 1..20: mol_type = other RNA
acccttgctctttgcctcct

SEQ ID NO: 8523 - RNA, 20 nt, synthetic construct
  source 1..20: mol_type = other RNA
gagacagggcccagcctagg

SEQ ID NO: 8524 - RNA, 20 nt, synthetic construct
  source 1..20: mol_type = other RNA
ttgctctttgcctcctaggc

SEQ ID NO: 8525 - RNA, 20 nt, synthetic construct
  source 1..20: mol_type = other RNA
tgctctttgcctcctaggct

SEQ ID NO: 8526 - RNA, 20 nt, synthetic construct
  source 1..20: mol_type = other RNA
cctgagacagggcccagcct

SEQ ID NO: 8527 - RNA, 20 nt, synthetic construct
  source 1..20: mol_type = other RNA
cctaggctgggccctgtctc

SEQ ID NO: 8528 - RNA, 20 nt, synthetic construct
  source 1..20: mol_type = other RNA
aagcctgggggcctgagaca

SEQ ID NO: 8529 - RNA, 20 nt, synthetic construct
  source 1..20: mol_type = other RNA
aaagcctgggggcctgagac

SEQ ID NO: 8530 - RNA, 20 nt, synthetic construct
  source 1..20: mol_type = other RNA
gggccctgtctcaggccccc

SEQ ID NO: 8531 - RNA, 20 nt, synthetic construct
  source 1..20: mol_type = other RNA
ccagtttggggaaagcctgg

SEQ ID NO: 8532 - RNA, 20 nt, synthetic construct
  source 1..20: mol_type = other RNA
accagtttggggaaagcctg

SEQ ID NO: 8533 - RNA, 20 nt, synthetic construct
  source 1..20: mol_type = other RNA
caccagtttggggaaagcct

SEQ ID NO: 8534 - RNA, 20 nt, synthetic construct
  source 1..20: mol_type = other RNA
gcaccagtttggggaaagcc

SEQ ID NO: 8535 - RNA, 20 nt, synthetic construct
  source 1..20: mol_type = other RNA
cccccaggctttccccaaac

SEQ ID NO: 8536 - RNA, 20 nt, synthetic construct
  source 1..20: mol_type = other RNA
tgaggatccgcaccagtttg

SEQ ID NO: 8537 - RNA, 20 nt, synthetic construct
  source 1..20: mol_type = other RNA
gtgaggatccgcaccagttt

SEQ ID NO: 8538 - RNA, 20 nt, synthetic construct
  source 1..20: mol_type = other RNA
cgtgaggatccgcaccagtt

SEQ ID NO: 8539 - RNA, 20 nt, synthetic construct
  source 1..20: mol_type = other RNA
aggctttccccaaactggtg

SEQ ID NO: 8540 - RNA, 20 nt, synthetic construct
  source 1..20: mol_type = other RNA
caaactggtgcggatcctca

SEQ ID NO: 8541 - RNA, 20 nt, synthetic construct
  source 1..20: mol_type = other RNA
gcagggaggaaaaggccgtg

SEQ ID NO: 8542 - RNA, 20 nt, synthetic construct
  source 1..20: mol_type = other RNA
cagatgctgcagggaggaaa

SEQ ID NO: 8543 - RNA, 20 nt, synthetic construct
  source 1..20: mol_type = other RNA
tcactccagatgctgcaggg

SEQ ID NO: 8544 - RNA, 20 nt, synthetic construct
  source 1..20: mol_type = other RNA
tactcactccagatgctgca

SEQ ID NO: 8545 - RNA, 20 nt, synthetic construct
  source 1..20: mol_type = other RNA
atactcactccagatgctgc

SEQ ID NO: 8546 - RNA, 20 nt, synthetic construct
  source 1..20: mol_type = other RNA
cttttcctccctgcagcatc

SEQ ID NO: 8547 - RNA, 20 nt, synthetic construct
  source 1..20: mol_type = other RNA
tctggagtgagtatagactc

SEQ ID NO: 8548 - RNA, 20 nt, synthetic construct
  source 1..20: mol_type = other RNA
ctggagtgagtatagactct

SEQ ID NO: 8549 - RNA, 20 nt, synthetic construct
  source 1..20: mol_type = other RNA
acccagatgttgagaggaag

SEQ ID NO: 8550 - RNA, 20 nt, synthetic construct
  source 1..20: mol_type = other RNA
cacccagatgttgagaggaa

SEQ ID NO: 8551 - RNA, 20 nt, synthetic construct
  source 1..20: mol_type = other RNA
gcacccagatgttgagagga

SEQ ID NO: 8552 - RNA, 20 nt, synthetic construct
  source 1..20: mol_type = other RNA
cactgcacccagatgttgag

SEQ ID NO: 8553 - RNA, 20 nt, synthetic construct
  source 1..20: mol_type = other RNA
gaccccttcctctcaacatc

SEQ ID NO: 8554 - RNA, 20 nt, synthetic construct
  source 1..20: mol_type = other RNA
accccttcctctcaacatct

SEQ ID NO: 8555 - RNA, 20 nt, synthetic construct
  source 1..20: mol_type = other RNA
tacttgaggccaggaattcg

SEQ ID NO: 8556 - RNA, 20 nt, synthetic construct
  source 1..20: mol_type = other RNA
tcactgcagcctcgaattcc

SEQ ID NO: 8557 - RNA, 20 nt, synthetic construct
  source 1..20: mol_type = other RNA
caggaggactacttgaggcc

SEQ ID NO: 8558 - RNA, 20 nt, synthetic construct
  source 1..20: mol_type = other RNA
tgaggcaggaggactacttg

SEQ ID NO: 8559 - RNA, 20 nt, synthetic construct
  source 1..20: mol_type = other RNA
actcaggaggctgaggcagg

SEQ ID NO: 8560 - RNA, 20 nt, synthetic construct
  source 1..20: mol_type = other RNA
gctactcaggaggctgaggc

SEQ ID NO: 8561 - RNA, 20 nt, synthetic construct
  source 1..20: mol_type = other RNA
cccagctactcaggaggctg

SEQ ID NO: 8562 - RNA, 20 nt, synthetic construct
  source 1..20: mol_type = other RNA
tgtggtcccagctactcagg

SEQ ID NO: 8563 - RNA, 20 nt, synthetic construct
  source 1..20: mol_type = other RNA
acctgtggtcccagctactc

SEQ ID NO: 8564 - RNA, 20 nt, synthetic construct
  source 1..20: mol_type = other RNA
gcctcagcctcctgagtagc

SEQ ID NO: 8565 - RNA, 20 nt, synthetic construct
  source 1..20: mol_type = other RNA
cctcagcctcctgagtagct

SEQ ID NO: 8566 - RNA, 20 nt, synthetic construct
  source 1..20: mol_type = other RNA
tcctgagtagctgggaccac

SEQ ID NO: 8567 - RNA, 20 nt, synthetic construct
  source 1..20: mol_type = other RNA
ggcactgtagcatgcacctg

SEQ ID NO: 8568 - RNA, 20 nt, synthetic construct
  source 1..20: mol_type = other RNA
gtcaaaacccagaggttgct

SEQ ID NO: 8569 - RNA, 20 nt, synthetic construct
  source 1..20: mol_type = other RNA
tgtcaaaacccagaggttgc

SEQ ID NO: 8570 - RNA, 20 nt, synthetic construct
  source 1..20: mol_type = other RNA
ctacagtgcccagcaacctc

SEQ ID NO: 8571 - RNA, 20 nt, synthetic construct
  source 1..20: mol_type = other RNA
tacagtgcccagcaacctct

SEQ ID NO: 8572 - RNA, 20 nt, synthetic construct
  source 1..20: mol_type = other RNA
ttggggttgtcaaaacccag

SEQ ID NO: 8573 - RNA, 20 nt, synthetic construct
  source 1..20: mol_type = other RNA
tgccttgggggcaggatttg

SEQ ID NO: 8574 - RNA, 20 nt, synthetic construct
  source 1..20: mol_type = other RNA
gtgccttgggggcaggattt

SEQ ID NO: 8575 - RNA, 20 nt, synthetic construct
  source 1..20: mol_type = other RNA
ggtgccttgggggcaggatt

SEQ ID NO: 8576 - RNA, 20 nt, synthetic construct
  source 1..20: mol_type = other RNA
tctgcaggtgccttgggggc

SEQ ID NO: 8577 - RNA, 20 nt, synthetic construct
  source 1..20: mol_type = other RNA
aaccccaaatcctgccccca

SEQ ID NO: 8578 - RNA, 20 nt, synthetic construct
  source 1..20: mol_type = other RNA
tctttctgcaggtgccttgg

SEQ ID NO: 8579 - RNA, 20 nt, synthetic construct
  source 1..20: mol_type = other RNA
ttctttctgcaggtgccttg

SEQ ID NO: 8580 - RNA, 20 nt, synthetic construct
  source 1..20: mol_type = other RNA
tttctttctgcaggtgcctt

SEQ ID NO: 8581 - RNA, 20 nt, synthetic construct
  source 1..20: mol_type = other RNA
ttttctttctgcaggtgcct

SEQ ID NO: 8582 - RNA, 20 nt, synthetic construct
  source 1..20: mol_type = other RNA
gtgagggcttttctttctgc

SEQ ID NO: 8583 - RNA, 20 nt, synthetic construct
  source 1..20: mol_type = other RNA
gaaaaaaagggacaaagtga

SEQ ID NO: 8584 - RNA, 20 nt, synthetic construct
  source 1..20: mol_type = other RNA
agaaaaaaagggacaaagtg

SEQ ID NO: 8585 - RNA, 20 nt, synthetic construct
  source 1..20: mol_type = other RNA
aggcggaagagagaaaaaaa

SEQ ID NO: 8586 - RNA, 20 nt, synthetic construct
  source 1..20: mol_type = other RNA
taggcggaagagagaaaaaa

SEQ ID NO: 8587 - RNA, 20 nt, synthetic construct
  source 1..20: mol_type = other RNA
cacattgaggatgcagtagg

SEQ ID NO: 8588 - RNA, 20 nt, synthetic construct
  source 1..20: mol_type = other RNA
agccacattgaggatgcagt

SEQ ID NO: 8589 - RNA, 20 nt, synthetic construct
  source 1..20: mol_type = other RNA
cgcctactgcatcctcaatg

SEQ ID NO: 8590 - RNA, 20 nt, synthetic construct
  source 1..20: mol_type = other RNA
ctcatgtgccagccacattg

SEQ ID NO: 8591 - RNA, 20 nt, synthetic construct
  source 1..20: mol_type = other RNA
tactgcatcctcaatgtggc

SEQ ID NO: 8592 - RNA, 20 nt, synthetic construct
  source 1..20: mol_type = other RNA
ctggggattcccatctgatg

SEQ ID NO: 8593 - RNA, 20 nt, synthetic construct
  source 1..20: mol_type = other RNA
tacaactttttttgtcactg

SEQ ID NO: 8594 - RNA, 20 nt, synthetic construct
  source 1..20: mol_type = other RNA
ctacaactttttttgtcact

SEQ ID NO: 8595 - RNA, 20 nt, synthetic construct
  source 1..20: mol_type = other RNA
tctacaactttttttgtcac

SEQ ID NO: 8596 - RNA, 20 nt, synthetic construct
  source 1..20: mol_type = other RNA
ggagtttcaaaggtcacgaa

SEQ ID NO: 8597 - RNA, 20 nt, synthetic construct
  source 1..20: mol_type = other RNA
tgtgaggaaaggagtttcaa

SEQ ID NO: 8598 - RNA, 20 nt, synthetic construct
  source 1..20: mol_type = other RNA
gcaaatgaggttgtgaggaa

SEQ ID NO: 8599 - RNA, 20 nt, synthetic construct
  source 1..20: mol_type = other RNA
gagcagcaaatgaggttgtg

SEQ ID NO: 8600 - RNA, 20 nt, synthetic construct
  source 1..20: mol_type = other RNA
attgctgagagcagcaaatg

SEQ ID NO: 8601 - RNA, 20 nt, synthetic construct
  source 1..20: mol_type = other RNA
gctgctctcagcaattcagc

SEQ ID NO: 8602 - RNA, 20 nt, synthetic construct
  source 1..20: mol_type = other RNA
ctgctctcagcaattcagct

SEQ ID NO: 8603 - RNA, 20 nt, synthetic construct
  source 1..20: mol_type = other RNA
tgctctcagcaattcagctg

SEQ ID NO: 8604 - RNA, 20 nt, synthetic construct
  source 1..20: mol_type = other RNA
tctcagcaattcagctgggg

SEQ ID NO: 8605 - RNA, 20 nt, synthetic construct
  source 1..20: mol_type = other RNA
ctcagcaattcagctgggga

SEQ ID NO: 8606 - RNA, 20 nt, synthetic construct
  source 1..20: mol_type = other RNA
caattcagctggggagggat

SEQ ID NO: 8607 - RNA, 20 nt, synthetic construct
  source 1..20: mol_type = other RNA
aattcagctggggagggatt

SEQ ID NO: 8608 - RNA, 20 nt, synthetic construct
  source 1..20: mol_type = other RNA
attcagctggggagggattg

SEQ ID NO: 8609 - RNA, 20 nt, synthetic construct
  source 1..20: mol_type = other RNA
cttaacctccactgtaaagt

SEQ ID NO: 8610 - RNA, 20 nt, synthetic construct
  source 1..20: mol_type = other RNA
agcatagtcctactttacag

SEQ ID NO: 8611 - RNA, 20 nt, synthetic construct
  source 1..20: mol_type = other RNA
atagtcctactttacagtgg

SEQ ID NO: 8612 - RNA, 20 nt, synthetic construct
  source 1..20: mol_type = other RNA
ctactttacagtggaggtta

SEQ ID NO: 8613 - RNA, 20 nt, synthetic construct
  source 1..20: mol_type = other RNA
taaggaagttgccaagcctc

SEQ ID NO: 8614 - RNA, 20 nt, synthetic construct
  source 1..20: mol_type = other RNA
ggaactaagcccctgaggct

SEQ ID NO: 8615 - RNA, 20 nt, synthetic construct
  source 1..20: mol_type = other RNA
aaggaagttgccaagcctca

SEQ ID NO: 8616 - RNA, 20 nt, synthetic construct
  source 1..20: mol_type = other RNA
aggaagttgccaagcctcag

SEQ ID NO: 8617 - RNA, 20 nt, synthetic construct
  source 1..20: mol_type = other RNA
tcttaggaactaagcccctg

SEQ ID NO: 8618 - RNA, 20 nt, synthetic construct
  source 1..20: mol_type = other RNA
gaatccctgtttagcttctt

SEQ ID NO: 8619 - RNA, 20 nt, synthetic construct
  source 1..20: mol_type = other RNA
tagttcctaagaagctaaac

SEQ ID NO: 8620 - RNA, 20 nt, synthetic construct
  source 1..20: mol_type = other RNA
agttcctaagaagctaaaca

SEQ ID NO: 8621 - RNA, 20 nt, synthetic construct
  source 1..20: mol_type = other RNA
gggcaaagtctaactcatga

SEQ ID NO: 8622 - RNA, 20 nt, synthetic construct
  source 1..20: mol_type = other RNA
atgagttagactttgccctc

SEQ ID NO: 8623 - RNA, 20 nt, synthetic construct
  source 1..20: mol_type = other RNA
gctccaaccaggcagccaga

SEQ ID NO: 8624 - RNA, 20 nt, synthetic construct
  source 1..20: mol_type = other RNA
ggctccaaccaggcagccag

SEQ ID NO: 8625 - RNA, 20 nt, synthetic construct
  source 1..20: mol_type = other RNA
gactttgccctctggctgcc

SEQ ID NO: 8626 - RNA, 20 nt, synthetic construct
  source 1..20: mol_type = other RNA
ttgccctctggctgcctggt

SEQ ID NO: 8627 - RNA, 20 nt, synthetic construct
  source 1..20: mol_type = other RNA
atcacctgggggctccaacc

SEQ ID NO: 8628 - RNA, 20 nt, synthetic construct
  source 1..20: mol_type = other RNA
gctgcctggttggagccccc

SEQ ID NO: 8629 - RNA, 20 nt, synthetic construct
  source 1..20: mol_type = other RNA
acgaggacttcatcacctgg

SEQ ID NO: 8630 - RNA, 20 nt, synthetic construct
  source 1..20: mol_type = other RNA
gacgaggacttcatcacctg

SEQ ID NO: 8631 - RNA, 20 nt, synthetic construct
  source 1..20: mol_type = other RNA
agacgaggacttcatcacct

SEQ ID NO: 8632 - RNA, 20 nt, synthetic construct
  source 1..20: mol_type = other RNA
cagacgaggacttcatcacc

SEQ ID NO: 8633 - RNA, 20 nt, synthetic construct
  source 1..20: mol_type = other RNA
attcctgagcttttcagacg

SEQ ID NO: 8634 - RNA, 20 nt, synthetic construct
  source 1..20: mol_type = other RNA
agtcctcgtctgaaaagctc

SEQ ID NO: 8635 - RNA, 20 nt, synthetic construct
  source 1..20: mol_type = other RNA
tgaaaagctcaggaatgtgc

SEQ ID NO: 8636 - RNA, 20 nt, synthetic construct
  source 1..20: mol_type = other RNA
tctaatacaccataggcagc

SEQ ID NO: 8637 - RNA, 20 nt, synthetic construct
  source 1..20: mol_type = other RNA
aggaatgtgccggctgccta

SEQ ID NO: 8638 - RNA, 20 nt, synthetic construct
  source 1..20: mol_type = other RNA
ccccagctctaatacaccat

SEQ ID NO: 8639 - RNA, 20 nt, synthetic construct
  source 1..20: mol_type = other RNA
tgcctatggtgtattagagc

SEQ ID NO: 8640 - RNA, 20 nt, synthetic construct
  source 1..20: mol_type = other RNA
gcctatggtgtattagagct

SEQ ID NO: 8641 - RNA, 20 nt, synthetic construct
  source 1..20: mol_type = other RNA
cctatggtgtattagagctg

SEQ ID NO: 8642 - RNA, 20 nt, synthetic construct
  source 1..20: mol_type = other RNA
ctatggtgtattagagctgg

SEQ ID NO: 8643 - RNA, 20 nt, synthetic construct
  source 1..20: mol_type = other RNA
tatggtgtattagagctggg

SEQ ID NO: 8644 - RNA, 20 nt, synthetic construct
  source 1..20: mol_type = other RNA
ggtgtattagagctgggggg

SEQ ID NO: 8645 - RNA, 20 nt, synthetic construct
  source 1..20: mol_type = other RNA
gtgtattagagctggggggt

SEQ ID NO: 8646 - RNA, 20 nt, synthetic construct
  source 1..20: mol_type = other RNA
attagagctggggggtggga

SEQ ID NO: 8647 - RNA, 20 nt, synthetic construct
  source 1..20: mol_type = other RNA
ttagagctggggggtgggaa

SEQ ID NO: 8648 - RNA, 20 nt, synthetic construct
  source 1..20: mol_type = other RNA
agctggggggtgggaagggc

SEQ ID NO: 8649 - RNA, 20 nt, synthetic construct
  source 1..20: mol_type = other RNA
gggtgggaagggcaggtgcc

SEQ ID NO: 8650 - RNA, 20 nt, synthetic construct
  source 1..20: mol_type = other RNA
ggtgggaagggcaggtgcca

SEQ ID NO: 8651 - RNA, 20 nt, synthetic construct
  source 1..20: mol_type = other RNA
aagggcaggtgccagggctg

SEQ ID NO: 8652 - RNA, 20 nt, synthetic construct
  source 1..20: mol_type = other RNA
agtgagggcctcctcagccc

SEQ ID NO: 8653 - RNA, 20 nt, synthetic construct
  source 1..20: mol_type = other RNA
ggcaggtgccagggctgagg

SEQ ID NO: 8654 - RNA, 20 nt, synthetic construct
  source 1..20: mol_type = other RNA
agggctgaggaggccctcac

SEQ ID NO: 8655 - RNA, 20 nt, synthetic construct
  source 1..20: mol_type = other RNA
gggctgaggaggccctcact

SEQ ID NO: 8656 - RNA, 20 nt, synthetic construct
  source 1..20: mol_type = other RNA
gacccttcccatcccagtga

SEQ ID NO: 8657 - RNA, 20 nt, synthetic construct
  source 1..20: mol_type = other RNA
tgacccttcccatcccagtg

SEQ ID NO: 8658 - RNA, 20 nt, synthetic construct
  source 1..20: mol_type = other RNA
tgaggaggccctcactggga

SEQ ID NO: 8659 - RNA, 20 nt, synthetic construct
  source 1..20: mol_type = other RNA
gaggaggccctcactgggat

SEQ ID NO: 8660 - RNA, 20 nt, synthetic construct
  source 1..20: mol_type = other RNA
aggccctcactgggatggga

SEQ ID NO: 8661 - RNA, 20 nt, synthetic construct
  source 1..20: mol_type = other RNA
ggccctcactgggatgggaa

SEQ ID NO: 8662 - RNA, 20 nt, synthetic construct
  source 1..20: mol_type = other RNA
ctgggatgggaagggtcaga

SEQ ID NO: 8663 - RNA, 20 nt, synthetic construct
  source 1..20: mol_type = other RNA
gggaagggtcagatggcccc

SEQ ID NO: 8664 - RNA, 20 nt, synthetic construct
  source 1..20: mol_type = other RNA
ggccatcagctagcgtcctg

SEQ ID NO: 8665 - RNA, 20 nt, synthetic construct
  source 1..20: mol_type = other RNA
gggccatcagctagcgtcct

SEQ ID NO: 8666 - RNA, 20 nt, synthetic construct
  source 1..20: mol_type = other RNA
ggggccatcagctagcgtcc

SEQ ID NO: 8667 - RNA, 20 nt, synthetic construct
  source 1..20: mol_type = other RNA
ggccccaggacgctagctga

SEQ ID NO: 8668 - RNA, 20 nt, synthetic construct
  source 1..20: mol_type = other RNA
ctgcaggtggaatcagatgg

SEQ ID NO: 8669 - RNA, 20 nt, synthetic construct
  source 1..20: mol_type = other RNA
gctgcaggtggaatcagatg

SEQ ID NO: 8670 - RNA, 20 nt, synthetic construct
  source 1..20: mol_type = other RNA
ggctgcaggtggaatcagat

SEQ ID NO: 8671 - RNA, 20 nt, synthetic construct
  source 1..20: mol_type = other RNA
aggctgcaggtggaatcaga

SEQ ID NO: 8672 - RNA, 20 nt, synthetic construct
  source 1..20: mol_type = other RNA
cagcgcatccaggctgcagg

SEQ ID NO: 8673 - RNA, 20 nt, synthetic construct
  source 1..20: mol_type = other RNA
atctgattccacctgcagcc

SEQ ID NO: 8674 - RNA, 20 nt, synthetic construct
  source 1..20: mol_type = other RNA
actcagcgcatccaggctgc

SEQ ID NO: 8675 - RNA, 20 nt, synthetic construct
  source 1..20: mol_type = other RNA
tgttctcactcagcgcatcc

SEQ ID NO: 8676 - RNA, 20 nt, synthetic construct
  source 1..20: mol_type = other RNA
gcgctgagtgagaacaagat

SEQ ID NO: 8677 - RNA, 20 nt, synthetic construct
  source 1..20: mol_type = other RNA
cgctgagtgagaacaagatc

SEQ ID NO: 8678 - RNA, 20 nt, synthetic construct
  source 1..20: mol_type = other RNA
gctgagtgagaacaagatcg

SEQ ID NO: 8679 - RNA, 20 nt, synthetic construct
  source 1..20: mol_type = other RNA
tgagaacaagatcggggacg

SEQ ID NO: 8680 - RNA, 20 nt, synthetic construct
  source 1..20: mol_type = other RNA
gagaacaagatcggggacga

SEQ ID NO: 8681 - RNA, 20 nt, synthetic construct
  source 1..20: mol_type = other RNA
ggacttcagctgggggaagg

SEQ ID NO: 8682 - RNA, 20 nt, synthetic construct
  source 1..20: mol_type = other RNA
caaggacttcagctggggga

SEQ ID NO: 8683 - RNA, 20 nt, synthetic construct
  source 1..20: mol_type = other RNA
tttccaaggacttcagctgg

SEQ ID NO: 8684 - RNA, 20 nt, synthetic construct
  source 1..20: mol_type = other RNA
gtttccaaggacttcagctg

SEQ ID NO: 8685 - RNA, 20 nt, synthetic construct
  source 1..20: mol_type = other RNA
ggtttccaaggacttcagct

SEQ ID NO: 8686 - RNA, 20 nt, synthetic construct
  source 1..20: mol_type = other RNA
gggtttccaaggacttcagc

SEQ ID NO: 8687 - RNA, 20 nt, synthetic construct
  source 1..20: mol_type = other RNA
cttcccccagctgaagtcct

SEQ ID NO: 8688 - RNA, 20 nt, synthetic construct
  source 1..20: mol_type = other RNA
cactcacttgagggtttcca

SEQ ID NO: 8689 - RNA, 20 nt, synthetic construct
  source 1..20: mol_type = other RNA
ggcccagctcactcacttga

SEQ ID NO: 8690 - RNA, 20 nt, synthetic construct
  source 1..20: mol_type = other RNA
aggcccagctcactcacttg

SEQ ID NO: 8691 - RNA, 20 nt, synthetic construct
  source 1..20: mol_type = other RNA
aaaccctcaagtgagtgagc

SEQ ID NO: 8692 - RNA, 20 nt, synthetic construct
  source 1..20: mol_type = other RNA
aaccctcaagtgagtgagct

SEQ ID NO: 8693 - RNA, 20 nt, synthetic construct
  source 1..20: mol_type = other RNA
cccgattcagcaggaagggc

SEQ ID NO: 8694 - RNA, 20 nt, synthetic construct
  source 1..20: mol_type = other RNA
ggggcccgattcagcaggaa

SEQ ID NO: 8695 - RNA, 20 nt, synthetic construct
  source 1..20: mol_type = other RNA
gggggcccgattcagcagga

SEQ ID NO: 8696 - RNA, 20 nt, synthetic construct
  source 1..20: mol_type = other RNA
ctttgggggcccgattcagc

SEQ ID NO: 8697 - RNA, 20 nt, synthetic construct
  source 1..20: mol_type = other RNA
gcctgcccttcctgctgaat

SEQ ID NO: 8698 - RNA, 20 nt, synthetic construct
  source 1..20: mol_type = other RNA
cctgcccttcctgctgaatc

SEQ ID NO: 8699 - RNA, 20 nt, synthetic construct
  source 1..20: mol_type = other RNA
aaaagtcagccggactttgg

SEQ ID NO: 8700 - RNA, 20 nt, synthetic construct
  source 1..20: mol_type = other RNA
aaaaagtcagccggactttg

SEQ ID NO: 8701 - RNA, 20 nt, synthetic construct
  source 1..20: mol_type = other RNA
tgaatcgggcccccaaagtc

SEQ ID NO: 8702 - RNA, 20 nt, synthetic construct
  source 1..20: mol_type = other RNA
gaaaaagtcagccggacttt

SEQ ID NO: 8703 - RNA, 20 nt, synthetic construct
  source 1..20: mol_type = other RNA
tgaaaaagtcagccggactt

SEQ ID NO: 8704 - RNA, 20 nt, synthetic construct
  source 1..20: mol_type = other RNA
ttaattttgaaaaagtcagc

SEQ ID NO: 8705 - RNA, 20 nt, synthetic construct
  source 1..20: mol_type = other RNA
taaatttgtttttttagaca

SEQ ID NO: 8706 - RNA, 20 nt, synthetic construct
  source 1..20: mol_type = other RNA
aaatttgtttttttagacaa

SEQ ID NO: 8707 - RNA, 20 nt, synthetic construct
  source 1..20: mol_type = other RNA
aagggctcgctgtgtcaccc

SEQ ID NO: 8708 - RNA, 20 nt, synthetic construct
  source 1..20: mol_type = other RNA
atagcactatattctagcct

SEQ ID NO: 8709 - RNA, 20 nt, synthetic construct
  source 1..20: mol_type = other RNA
catagcactatattctagcc

SEQ ID NO: 8710 - RNA, 20 nt, synthetic construct
  source 1..20: mol_type = other RNA
ccaggagttcaaggctgcag

SEQ ID NO: 8711 - RNA, 20 nt, synthetic construct
  source 1..20: mol_type = other RNA
tccttgaggccaggagttca

SEQ ID NO: 8712 - RNA, 20 nt, synthetic construct
  source 1..20: mol_type = other RNA
cctctgcagccttgaactcc

SEQ ID NO: 8713 - RNA, 20 nt, synthetic construct
  source 1..20: mol_type = other RNA
tgaggagattccttgaggcc

SEQ ID NO: 8714 - RNA, 20 nt, synthetic construct
  source 1..20: mol_type = other RNA
gccttgaactcctggcctca

SEQ ID NO: 8715 - RNA, 20 nt, synthetic construct
  source 1..20: mol_type = other RNA
ggaggtgaggagattccttg

SEQ ID NO: 8716 - RNA, 20 nt, synthetic construct
  source 1..20: mol_type = other RNA
cactttgggaagcggaggtg

SEQ ID NO: 8717 - RNA, 20 nt, synthetic construct
  source 1..20: mol_type = other RNA
cccagcactttgggaagcgg

SEQ ID NO: 8718 - RNA, 20 nt, synthetic construct
  source 1..20: mol_type = other RNA
aatcccagcactttgggaag

SEQ ID NO: 8719 - RNA, 20 nt, synthetic construct
  source 1..20: mol_type = other RNA
acctataatcccagcacttt

SEQ ID NO: 8720 - RNA, 20 nt, synthetic construct
  source 1..20: mol_type = other RNA
acctccgcttcccaaagtgc

SEQ ID NO: 8721 - RNA, 20 nt, synthetic construct
  source 1..20: mol_type = other RNA
cacctataatcccagcactt

SEQ ID NO: 8722 - RNA, 20 nt, synthetic construct
  source 1..20: mol_type = other RNA
cctccgcttcccaaagtgct

SEQ ID NO: 8723 - RNA, 20 nt, synthetic construct
  source 1..20: mol_type = other RNA
tcccaaagtgctgggattat

SEQ ID NO: 8724 - RNA, 20 nt, synthetic construct
  source 1..20: mol_type = other RNA
gaatccactggggctgggca

SEQ ID NO: 8725 - RNA, 20 nt, synthetic construct
  source 1..20: mol_type = other RNA
tggatgaatccactggggct

SEQ ID NO: 8726 - RNA, 20 nt, synthetic construct
  source 1..20: mol_type = other RNA
atggatgaatccactggggc

SEQ ID NO: 8727 - RNA, 20 nt, synthetic construct
  source 1..20: mol_type = other RNA
cttaccatgcccagccccag

SEQ ID NO: 8728 - RNA, 20 nt, synthetic construct
  source 1..20: mol_type = other RNA
gtgaatggatgaatccactg

SEQ ID NO: 8729 - RNA, 20 nt, synthetic construct
  source 1..20: mol_type = other RNA
agtgaatggatgaatccact

SEQ ID NO: 8730 - RNA, 20 nt, synthetic construct
  source 1..20: mol_type = other RNA
gagtgaatggatgaatccac

SEQ ID NO: 8731 - RNA, 20 nt, synthetic construct
  source 1..20: mol_type = other RNA
tgaataggtgaatgagtgaa

SEQ ID NO: 8732 - RNA, 20 nt, synthetic construct
  source 1..20: mol_type = other RNA
ggatgaatggctgattgaat

SEQ ID NO: 8733 - RNA, 20 nt, synthetic construct
  source 1..20: mol_type = other RNA
tcattgaatggaaggatgaa

SEQ ID NO: 8734 - RNA, 20 nt, synthetic construct
  source 1..20: mol_type = other RNA
tggatgaatcattgaatgga

SEQ ID NO: 8735 - RNA, 20 nt, synthetic construct
  source 1..20: mol_type = other RNA
tgaatggatgaatcattgaa

SEQ ID NO: 8736 - RNA, 20 nt, synthetic construct
  source 1..20: mol_type = other RNA
gaaatgactgcataagtgaa

SEQ ID NO: 8737 - RNA, 20 nt, synthetic construct
  source 1..20: mol_type = other RNA
ttgagtgagcggttggatga

SEQ ID NO: 8738 - RNA, 20 nt, synthetic construct
  source 1..20: mol_type = other RNA
attgagtgagcggttggatg

SEQ ID NO: 8739 - RNA, 20 nt, synthetic construct
  source 1..20: mol_type = other RNA
gaaatgattgagtgagcggt

SEQ ID NO: 8740 - RNA, 20 nt, synthetic construct
  source 1..20: mol_type = other RNA
taaagaaatgattgagtgag

SEQ ID NO: 8741 - RNA, 20 nt, synthetic construct
  source 1..20: mol_type = other RNA
gattaaattaataaatggtt

SEQ ID NO: 8742 - RNA, 20 nt, synthetic construct
  source 1..20: mol_type = other RNA
tgattaaattaataaatggt

SEQ ID NO: 8743 - RNA, 20 nt, synthetic construct
  source 1..20: mol_type = other RNA
ttgttgattaaattaataaa

SEQ ID NO: 8744 - RNA, 20 nt, synthetic construct
  source 1..20: mol_type = other RNA
atttaatcaacaaatattta

SEQ ID NO: 8745 - RNA, 20 nt, synthetic construct
  source 1..20: mol_type = other RNA
taatcaacaaatatttaagg

SEQ ID NO: 8746 - RNA, 20 nt, synthetic construct
  source 1..20: mol_type = other RNA
gaaaggtgcctgcacatagt

SEQ ID NO: 8747 - RNA, 20 nt, synthetic construct
  source 1..20: mol_type = other RNA
aaggaggacctactatgtgc

SEQ ID NO: 8748 - RNA, 20 nt, synthetic construct
  source 1..20: mol_type = other RNA
ctatgtgcaggcacctttct

SEQ ID NO: 8749 - RNA, 20 nt, synthetic construct
  source 1..20: mol_type = other RNA
tgggtctccagggcctagaa

SEQ ID NO: 8750 - RNA, 20 nt, synthetic construct
  source 1..20: mol_type = other RNA
gcaggcacctttctaggccc

SEQ ID NO: 8751 - RNA, 20 nt, synthetic construct
  source 1..20: mol_type = other RNA
tgtttaaagctgggtctcca

SEQ ID NO: 8752 - RNA, 20 nt, synthetic construct
  source 1..20: mol_type = other RNA
ttgtttaaagctgggtctcc

SEQ ID NO: 8753 - RNA, 20 nt, synthetic construct
  source 1..20: mol_type = other RNA
tatttgttttgtttaaagct

SEQ ID NO: 8754 - RNA, 20 nt, synthetic construct
  source 1..20: mol_type = other RNA
ttatttgttttgtttaaagc

SEQ ID NO: 8755 - RNA, 20 nt, synthetic construct
  source 1..20: mol_type = other RNA
tttaagattcctgaggtcag

SEQ ID NO: 8756 - RNA, 20 nt, synthetic construct
  source 1..20: mol_type = other RNA
atttaagattcctgaggtca

SEQ ID NO: 8757 - RNA, 20 nt, synthetic construct
  source 1..20: mol_type = other RNA
caaataaatcccctgacctc

SEQ ID NO: 8758 - RNA, 20 nt, synthetic construct
  source 1..20: mol_type = other RNA
aatttaagattcctgaggtc

SEQ ID NO: 8759 - RNA, 20 nt, synthetic construct
  source 1..20: mol_type = other RNA
actagaatttaagattcctg

SEQ ID NO: 8760 - RNA, 20 nt, synthetic construct
  source 1..20: mol_type = other RNA
aggaatcttaaattctagtg

SEQ ID NO: 8761 - RNA, 20 nt, synthetic construct
  source 1..20: mol_type = other RNA
caatgaacaagtaaacaagt

SEQ ID NO: 8762 - RNA, 20 nt, synthetic construct
  source 1..20: mol_type = other RNA
acagtaatgaaaataatgtt

SEQ ID NO: 8763 - RNA, 20 nt, synthetic construct
  source 1..20: mol_type = other RNA
ttggtgacagaaaattatac

SEQ ID NO: 8764 - RNA, 20 nt, synthetic construct
  source 1..20: mol_type = other RNA
tggtgacagaaaattatact

SEQ ID NO: 8765 - RNA, 20 nt, synthetic construct
  source 1..20: mol_type = other RNA
ggtgacagaaaattatactg

SEQ ID NO: 8766 - RNA, 20 nt, synthetic construct
  source 1..20: mol_type = other RNA
gtgacagaaaattatactgg

SEQ ID NO: 8767 - RNA, 20 nt, synthetic construct
  source 1..20: mol_type = other RNA
tgacagaaaattatactggg

SEQ ID NO: 8768 - RNA, 20 nt, synthetic construct
  source 1..20: mol_type = other RNA
attatactggggggtgaaat

SEQ ID NO: 8769 - RNA, 20 nt, synthetic construct
  source 1..20: mol_type = other RNA
tgaaataggagagatagatt

SEQ ID NO: 8770 - RNA, 20 nt, synthetic construct
  source 1..20: mol_type = other RNA
aaactttttaaaaactgttc

SEQ ID NO: 8771 - RNA, 20 nt, synthetic construct
  source 1..20: mol_type = other RNA
aactttttaaaaactgttct

SEQ ID NO: 8772 - RNA, 20 nt, synthetic construct
  source 1..20: mol_type = other RNA
ttaaaaactgttctgggctc

SEQ ID NO: 8773 - RNA, 20 nt, synthetic construct
  source 1..20: mol_type = other RNA
taaaaactgttctgggctct

SEQ ID NO: 8774 - RNA, 20 nt, synthetic construct
  source 1..20: mol_type = other RNA
tgttctgggctctgggaagt

SEQ ID NO: 8775 - RNA, 20 nt, synthetic construct
  source 1..20: mol_type = other RNA
gggctctgggaagttggaga

SEQ ID NO: 8776 - RNA, 20 nt, synthetic construct
  source 1..20: mol_type = other RNA
gttggagatggataagatac

SEQ ID NO: 8777 - RNA, 20 nt, synthetic construct
  source 1..20: mol_type = other RNA
ggagatggataagatacagg

SEQ ID NO: 8778 - RNA, 20 nt, synthetic construct
  source 1..20: mol_type = other RNA
ttttttctttttttcagaca

SEQ ID NO: 8779 - RNA, 20 nt, synthetic construct
  source 1..20: mol_type = other RNA
aaggtctcgctctgtcaccc

SEQ ID NO: 8780 - RNA, 20 nt, synthetic construct
  source 1..20: mol_type = other RNA
aggtctcgctctgtcaccca

SEQ ID NO: 8781 - RNA, 20 nt, synthetic construct
  source 1..20: mol_type = other RNA
tctcgctctgtcacccaggg

SEQ ID NO: 8782 - RNA, 20 nt, synthetic construct
  source 1..20: mol_type = other RNA
acaccactgcactccaccct

SEQ ID NO: 8783 - RNA, 20 nt, synthetic construct
  source 1..20: mol_type = other RNA
tacaccactgcactccaccc

SEQ ID NO: 8784 - RNA, 20 nt, synthetic construct
  source 1..20: mol_type = other RNA
tcacccagggtggagtgcag

SEQ ID NO: 8785 - RNA, 20 nt, synthetic construct
  source 1..20: mol_type = other RNA
ggagtgcagtggtgtaatca

SEQ ID NO: 8786 - RNA, 20 nt, synthetic construct
  source 1..20: mol_type = other RNA
tgcttgagcctaggagattg

SEQ ID NO: 8787 - RNA, 20 nt, synthetic construct
  source 1..20: mol_type = other RNA
cactgcagcctcaatctcct

SEQ ID NO: 8788 - RNA, 20 nt, synthetic construct
  source 1..20: mol_type = other RNA
tgggaggattgcttgagcct

SEQ ID NO: 8789 - RNA, 20 nt, synthetic construct
  source 1..20: mol_type = other RNA
actcagaaggttgagatggg

SEQ ID NO: 8790 - RNA, 20 nt, synthetic construct
  source 1..20: mol_type = other RNA
gctactcagaaggttgagat

SEQ ID NO: 8791 - RNA, 20 nt, synthetic construct
  source 1..20: mol_type = other RNA
agctactcagaaggttgaga

SEQ ID NO: 8792 - RNA, 20 nt, synthetic construct
  source 1..20: mol_type = other RNA
acctgtcccagctactcaga

SEQ ID NO: 8793 - RNA, 20 nt, synthetic construct
  source 1..20: mol_type = other RNA
atctcaaccttctgagtagc

SEQ ID NO: 8794 - RNA, 20 nt, synthetic construct
  source 1..20: mol_type = other RNA
tctcaaccttctgagtagct

SEQ ID NO: 8795 - RNA, 20 nt, synthetic construct
  source 1..20: mol_type = other RNA
accttctgagtagctgggac

SEQ ID NO: 8796 - RNA, 20 nt, synthetic construct
  source 1..20: mol_type = other RNA
caaaaattagcgggacgtgg

SEQ ID NO: 8797 - RNA, 20 nt, synthetic construct
  source 1..20: mol_type = other RNA
atacaaaaattagcgggacg

SEQ ID NO: 8798 - RNA, 20 nt, synthetic construct
  source 1..20: mol_type = other RNA
aaaaaaatacaaaaattagc

SEQ ID NO: 8799 - RNA, 20 nt, synthetic construct
  source 1..20: mol_type = other RNA
caaaaaaatacaaaaattag

SEQ ID NO: 8800 - RNA, 20 nt, synthetic construct
  source 1..20: mol_type = other RNA
tgtatttttttgtagagacg

SEQ ID NO: 8801 - RNA, 20 nt, synthetic construct
  source 1..20: mol_type = other RNA
caagaccagcctgggcaacg

SEQ ID NO: 8802 - RNA, 20 nt, synthetic construct
  source 1..20: mol_type = other RNA
gtggtttcaccacgttgccc

SEQ ID NO: 8803 - RNA, 20 nt, synthetic construct
  source 1..20: mol_type = other RNA
tttcaccacgttgcccaggc

SEQ ID NO: 8804 - RNA, 20 nt, synthetic construct
  source 1..20: mol_type = other RNA
cagaagttcaagaccagcct

SEQ ID NO: 8805 - RNA, 20 nt, synthetic construct
  source 1..20: mol_type = other RNA
tcagaagttcaagaccagcc

SEQ ID NO: 8806 - RNA, 20 nt, synthetic construct
  source 1..20: mol_type = other RNA
gggaggcagaggcaggagga

SEQ ID NO: 8807 - RNA, 20 nt, synthetic construct
  source 1..20: mol_type = other RNA
ctttgggaggcagaggcagg

SEQ ID NO: 8808 - RNA, 20 nt, synthetic construct
  source 1..20: mol_type = other RNA
gtactttgggaggcagaggc

SEQ ID NO: 8809 - RNA, 20 nt, synthetic construct
  source 1..20: mol_type = other RNA
cccagtactttgggaggcag

SEQ ID NO: 8810 - RNA, 20 nt, synthetic construct
  source 1..20: mol_type = other RNA
tgtaatcccagtactttggg

SEQ ID NO: 8811 - RNA, 20 nt, synthetic construct
  source 1..20: mol_type = other RNA
gcctgtaatcccagtacttt

SEQ ID NO: 8812 - RNA, 20 nt, synthetic construct
  source 1..20: mol_type = other RNA
gcctctgcctcccaaagtac

SEQ ID NO: 8813 - RNA, 20 nt, synthetic construct
  source 1..20: mol_type = other RNA
tgcctgtaatcccagtactt

SEQ ID NO: 8814 - RNA, 20 nt, synthetic construct
  source 1..20: mol_type = other RNA
cctctgcctcccaaagtact

SEQ ID NO: 8815 - RNA, 20 nt, synthetic construct
  source 1..20: mol_type = other RNA
tcccaaagtactgggattac

SEQ ID NO: 8816 - RNA, 20 nt, synthetic construct
  source 1..20: mol_type = other RNA
caggcatgagtcactgtgcc

SEQ ID NO: 8817 - RNA, 20 nt, synthetic construct
  source 1..20: mol_type = other RNA
aaaaaaaatcccattgaacc

SEQ ID NO: 8818 - RNA, 20 nt, synthetic construct
  source 1..20: mol_type = other RNA
agtcactgtgcctggttcaa

SEQ ID NO: 8819 - RNA, 20 nt, synthetic construct
  source 1..20: mol_type = other RNA
gtcactgtgcctggttcaat

SEQ ID NO: 8820 - RNA, 20 nt, synthetic construct
  source 1..20: mol_type = other RNA
ttttttttttttttttgaca

SEQ ID NO: 8821 - RNA, 20 nt, synthetic construct
  source 1..20: mol_type = other RNA
ggagtctcgctctgtagccc

SEQ ID NO: 8822 - RNA, 20 nt, synthetic construct
  source 1..20: mol_type = other RNA
tctcgctctgtagcccaggc

SEQ ID NO: 8823 - RNA, 20 nt, synthetic construct
  source 1..20: mol_type = other RNA
gtaccactgcactccagcct

SEQ ID NO: 8824 - RNA, 20 nt, synthetic construct
  source 1..20: mol_type = other RNA
cgtaccactgcactccagcc

SEQ ID NO: 8825 - RNA, 20 nt, synthetic construct
  source 1..20: mol_type = other RNA
tagcccaggctggagtgcag

SEQ ID NO: 8826 - RNA, 20 nt, synthetic construct
  source 1..20: mol_type = other RNA
ttattgcaaacttcacctcc

SEQ ID NO: 8827 - RNA, 20 nt, synthetic construct
  source 1..20: mol_type = other RNA
tattgcaaacttcacctcct

SEQ ID NO: 8828 - RNA, 20 nt, synthetic construct
  source 1..20: mol_type = other RNA
gagaattgcttgaacccagg

SEQ ID NO: 8829 - RNA, 20 nt, synthetic construct
  source 1..20: mol_type = other RNA
tgtgagaattgcttgaaccc

SEQ ID NO: 8830 - RNA, 20 nt, synthetic construct
  source 1..20: mol_type = other RNA
tccagctacttgggaggctg

SEQ ID NO: 8831 - RNA, 20 nt, synthetic construct
  source 1..20: mol_type = other RNA
tgtaattccagctacttggg

SEQ ID NO: 8832 - RNA, 20 nt, synthetic construct
  source 1..20: mol_type = other RNA
gcctgtaattccagctactt

SEQ ID NO: 8833 - RNA, 20 nt, synthetic construct
  source 1..20: mol_type = other RNA
acctcagcctcccaagtagc

SEQ ID NO: 8834 - RNA, 20 nt, synthetic construct
  source 1..20: mol_type = other RNA
tgcctgtaattccagctact

SEQ ID NO: 8835 - RNA, 20 nt, synthetic construct
  source 1..20: mol_type = other RNA
tcccaagtagctggaattac

SEQ ID NO: 8836 - RNA, 20 nt, synthetic construct
  source 1..20: mol_type = other RNA
caaaaattagttgggtgtag

SEQ ID NO: 8837 - RNA, 20 nt, synthetic construct
  source 1..20: mol_type = other RNA
taaaaatacaaaaattagtt

SEQ ID NO: 8838 - RNA, 20 nt, synthetic construct
  source 1..20: mol_type = other RNA
ctaaaaatacaaaaattagt

SEQ ID NO: 8839 - RNA, 20 nt, synthetic construct
  source 1..20: mol_type = other RNA
ttttgtatttttagtagaga

SEQ ID NO: 8840 - RNA, 20 nt, synthetic construct
  source 1..20: mol_type = other RNA
tttgtatttttagtagagac

SEQ ID NO: 8841 - RNA, 20 nt, synthetic construct
  source 1..20: mol_type = other RNA
ttgtatttttagtagagacg

SEQ ID NO: 8842 - RNA, 20 nt, synthetic construct
  source 1..20: mol_type = other RNA
agtagagacggggtttcacc

SEQ ID NO: 8843 - RNA, 20 nt, synthetic construct
  source 1..20: mol_type = other RNA
gagacggggtttcaccaggt

SEQ ID NO: 8844 - RNA, 20 nt, synthetic construct
  source 1..20: mol_type = other RNA
caagaccagcctggccaacc

SEQ ID NO: 8845 - RNA, 20 nt, synthetic construct
  source 1..20: mol_type = other RNA
ggggtttcaccaggttggcc

SEQ ID NO: 8846 - RNA, 20 nt, synthetic construct
  source 1..20: mol_type = other RNA
tttcaccaggttggccaggc

SEQ ID NO: 8847 - RNA, 20 nt, synthetic construct
  source 1..20: mol_type = other RNA
tcaggagttcaagaccagcc

SEQ ID NO: 8848 - RNA, 20 nt, synthetic construct
  source 1..20: mol_type = other RNA
tgggcggatcacttgaggtc

SEQ ID NO: 8849 - RNA, 20 nt, synthetic construct
  source 1..20: mol_type = other RNA
tgaggtgggcggatcacttg

SEQ ID NO: 8850 - RNA, 20 nt, synthetic construct
  source 1..20: mol_type = other RNA
ctttgggaggctgaggtggg

SEQ ID NO: 8851 - RNA, 20 nt, synthetic construct
  source 1..20: mol_type = other RNA
gcactttgggaggctgaggt

SEQ ID NO: 8852 - RNA, 20 nt, synthetic construct
  source 1..20: mol_type = other RNA
agcactttgggaggctgagg

SEQ ID NO: 8853 - RNA, 20 nt, synthetic construct
  source 1..20: mol_type = other RNA
cccagcactttgggaggctg

SEQ ID NO: 8854 - RNA, 20 nt, synthetic construct
  source 1..20: mol_type = other RNA
ggtaatcccagcactttggg

SEQ ID NO: 8855 - RNA, 20 nt, synthetic construct
  source 1..20: mol_type = other RNA
gccggtaatcccagcacttt

SEQ ID NO: 8856 - RNA, 20 nt, synthetic construct
  source 1..20: mol_type = other RNA
acctcagcctcccaaagtgc

SEQ ID NO: 8857 - RNA, 20 nt, synthetic construct
  source 1..20: mol_type = other RNA
tgccggtaatcccagcactt

SEQ ID NO: 8858 - RNA, 20 nt, synthetic construct
  source 1..20: mol_type = other RNA
cctcagcctcccaaagtgct

SEQ ID NO: 8859 - RNA, 20 nt, synthetic construct
  source 1..20: mol_type = other RNA
tcccaaagtgctgggattac

SEQ ID NO: 8860 - RNA, 20 nt, synthetic construct
  source 1..20: mol_type = other RNA
ctgggcgtggtggctcatgc

SEQ ID NO: 8861 - RNA, 20 nt, synthetic construct
  source 1..20: mol_type = other RNA
tcatgttgaactgggcgtgg

SEQ ID NO: 8862 - RNA, 20 nt, synthetic construct
  source 1..20: mol_type = other RNA
aaatcatgttgaactgggcg

SEQ ID NO: 8863 - RNA, 20 nt, synthetic construct
  source 1..20: mol_type = other RNA
gtaaaaaatcatgttgaact

SEQ ID NO: 8864 - RNA, 20 nt, synthetic construct
  source 1..20: mol_type = other RNA
agtaaaaaatcatgttgaac

SEQ ID NO: 8865 - RNA, 20 nt, synthetic construct
  source 1..20: mol_type = other RNA
tgattttttactgaacctag

SEQ ID NO: 8866 - RNA, 20 nt, synthetic construct
  source 1..20: mol_type = other RNA
ggaagattttgatatcctct

SEQ ID NO: 8867 - RNA, 20 nt, synthetic construct
  source 1..20: mol_type = other RNA
ttggttgtgagggggagtgt

SEQ ID NO: 8868 - RNA, 20 nt, synthetic construct
  source 1..20: mol_type = other RNA
cttggttgtgagggggagtg

SEQ ID NO: 8869 - RNA, 20 nt, synthetic construct
  source 1..20: mol_type = other RNA
ctaagaccttggttgtgagg

SEQ ID NO: 8870 - RNA, 20 nt, synthetic construct
  source 1..20: mol_type = other RNA
cctaagaccttggttgtgag

SEQ ID NO: 8871 - RNA, 20 nt, synthetic construct
  source 1..20: mol_type = other RNA
tcctaagaccttggttgtga

SEQ ID NO: 8872 - RNA, 20 nt, synthetic construct
  source 1..20: mol_type = other RNA
atcctaagaccttggttgtg

SEQ ID NO: 8873 - RNA, 20 nt, synthetic construct
  source 1..20: mol_type = other RNA
cacactccccctcacaacca

SEQ ID NO: 8874 - RNA, 20 nt, synthetic construct
  source 1..20: mol_type = other RNA
atttggccatcctaagacct

SEQ ID NO: 8875 - RNA, 20 nt, synthetic construct
  source 1..20: mol_type = other RNA
cccctcacaaccaaggtctt

SEQ ID NO: 8876 - RNA, 20 nt, synthetic construct
  source 1..20: mol_type = other RNA
tcacaaccaaggtcttagga

SEQ ID NO: 8877 - RNA, 20 nt, synthetic construct
  source 1..20: mol_type = other RNA
gtaaattccggtaaattatt

SEQ ID NO: 8878 - RNA, 20 nt, synthetic construct
  source 1..20: mol_type = other RNA
aggatggccaaataatttac

SEQ ID NO: 8879 - RNA, 20 nt, synthetic construct
  source 1..20: mol_type = other RNA
ggaaattgctaagtaaattc

SEQ ID NO: 8880 - RNA, 20 nt, synthetic construct
  source 1..20: mol_type = other RNA
gtcccacagtcctacaatta

SEQ ID NO: 8881 - RNA, 20 nt, synthetic construct
  source 1..20: mol_type = other RNA
ttagcaatttccttaattgt

SEQ ID NO: 8882 - RNA, 20 nt, synthetic construct
  source 1..20: mol_type = other RNA
tttccttaattgtaggactg

SEQ ID NO: 8883 - RNA, 20 nt, synthetic construct
  source 1..20: mol_type = other RNA
ttccttaattgtaggactgt

SEQ ID NO: 8884 - RNA, 20 nt, synthetic construct
  source 1..20: mol_type = other RNA
cctaggacactagaaattac

SEQ ID NO: 8885 - RNA, 20 nt, synthetic construct
  source 1..20: mol_type = other RNA
ccagtaatttctagtgtcct

SEQ ID NO: 8886 - RNA, 20 nt, synthetic construct
  source 1..20: mol_type = other RNA
tctagcttacagtgttacct

SEQ ID NO: 8887 - RNA, 20 nt, synthetic construct
  source 1..20: mol_type = other RNA
agagggggacggaaggacta

SEQ ID NO: 8888 - RNA, 20 nt, synthetic construct
  source 1..20: mol_type = other RNA
gtaagaaagagggggacgga

SEQ ID NO: 8889 - RNA, 20 nt, synthetic construct
  source 1..20: mol_type = other RNA
gcgggtaagaaagaggggga

SEQ ID NO: 8890 - RNA, 20 nt, synthetic construct
  source 1..20: mol_type = other RNA
ggtggcgggtaagaaagagg

SEQ ID NO: 8891 - RNA, 20 nt, synthetic construct
  source 1..20: mol_type = other RNA
gggtggcgggtaagaaagag

SEQ ID NO: 8892 - RNA, 20 nt, synthetic construct
  source 1..20: mol_type = other RNA
ggggtggcgggtaagaaaga

SEQ ID NO: 8893 - RNA, 20 nt, synthetic construct
  source 1..20: mol_type = other RNA
tggggtggcgggtaagaaag

SEQ ID NO: 8894 - RNA, 20 nt, synthetic construct
  source 1..20: mol_type = other RNA
aaatacttaagtggggtggc

SEQ ID NO: 8895 - RNA, 20 nt, synthetic construct
  source 1..20: mol_type = other RNA
taaatacttaagtggggtgg

SEQ ID NO: 8896 - RNA, 20 nt, synthetic construct
  source 1..20: mol_type = other RNA
caataaatacttaagtgggg

SEQ ID NO: 8897 - RNA, 20 nt, synthetic construct
  source 1..20: mol_type = other RNA
gctcaataaatacttaagtg

SEQ ID NO: 8898 - RNA, 20 nt, synthetic construct
  source 1..20: mol_type = other RNA
tgctcaataaatacttaagt

SEQ ID NO: 8899 - RNA, 20 nt, synthetic construct
  source 1..20: mol_type = other RNA
gtgctcaataaatacttaag

SEQ ID NO: 8900 - RNA, 20 nt, synthetic construct
  source 1..20: mol_type = other RNA
agcactgccaggcacatagt

SEQ ID NO: 8901 - RNA, 20 nt, synthetic construct
  source 1..20: mol_type = other RNA
ttgagcacctactatgtgcc

SEQ ID NO: 8902 - RNA, 20 nt, synthetic construct
  source 1..20: mol_type = other RNA
cctgtgcctagagcactgcc

SEQ ID NO: 8903 - RNA, 20 nt, synthetic construct
  source 1..20: mol_type = other RNA
tatgtgcctggcagtgctct

SEQ ID NO: 8904 - RNA, 20 nt, synthetic construct
  source 1..20: mol_type = other RNA
cctggcagtgctctaggcac

SEQ ID NO: 8905 - RNA, 20 nt, synthetic construct
  source 1..20: mol_type = other RNA
ctggcagtgctctaggcaca

SEQ ID NO: 8906 - RNA, 20 nt, synthetic construct
  source 1..20: mol_type = other RNA
tgtgggcttcacatggagca

SEQ ID NO: 8907 - RNA, 20 nt, synthetic construct
  source 1..20: mol_type = other RNA
ttgtgggcttcacatggagc

SEQ ID NO: 8908 - RNA, 20 nt, synthetic construct
  source 1..20: mol_type = other RNA
gccgggttgtgggcttcaca

SEQ ID NO: 8909 - RNA, 20 nt, synthetic construct
  source 1..20: mol_type = other RNA
tccatgtgaagcccacaacc

SEQ ID NO: 8910 - RNA, 20 nt, synthetic construct
  source 1..20: mol_type = other RNA
aatcctttctgccgggttgt

SEQ ID NO: 8911 - RNA, 20 nt, synthetic construct
  source 1..20: mol_type = other RNA
taatcctttctgccgggttg

SEQ ID NO: 8912 - RNA, 20 nt, synthetic construct
  source 1..20: mol_type = other RNA
gctgtgtaatcctttctgcc

SEQ ID NO: 8913 - RNA, 20 nt, synthetic construct
  source 1..20: mol_type = other RNA
aagcccacaacccggcagaa

SEQ ID NO: 8914 - RNA, 20 nt, synthetic construct
  source 1..20: mol_type = other RNA
ggctgtgtaatcctttctgc

SEQ ID NO: 8915 - RNA, 20 nt, synthetic construct
  source 1..20: mol_type = other RNA
tgttggcattatttgtttaa

SEQ ID NO: 8916 - RNA, 20 nt, synthetic construct
  source 1..20: mol_type = other RNA
cactataatgaaataagtgt

SEQ ID NO: 8917 - RNA, 20 nt, synthetic construct
  source 1..20: mol_type = other RNA
ttcattatagtgctgaaaag

SEQ ID NO: 8918 - RNA, 20 nt, synthetic construct
  source 1..20: mol_type = other RNA
agtgctgaaaagtggcgcag

SEQ ID NO: 8919 - RNA, 20 nt, synthetic construct
  source 1..20: mol_type = other RNA
gtgctgaaaagtggcgcaga

SEQ ID NO: 8920 - RNA, 20 nt, synthetic construct
  source 1..20: mol_type = other RNA
aagtggcgcagagggaaaag

SEQ ID NO: 8921 - RNA, 20 nt, synthetic construct
  source 1..20: mol_type = other RNA
agtggcgcagagggaaaaga

SEQ ID NO: 8922 - RNA, 20 nt, synthetic construct
  source 1..20: mol_type = other RNA
gtggcgcagagggaaaagag

SEQ ID NO: 8923 - RNA, 20 nt, synthetic construct
  source 1..20: mol_type = other RNA
gaggggatgttgtaaagtca

SEQ ID NO: 8924 - RNA, 20 nt, synthetic construct
  source 1..20: mol_type = other RNA
aggggatgttgtaaagtcat

SEQ ID NO: 8925 - RNA, 20 nt, synthetic construct
  source 1..20: mol_type = other RNA
atgttgtaaagtcatgggac

SEQ ID NO: 8926 - RNA, 20 nt, synthetic construct
  source 1..20: mol_type = other RNA
ttgtaaagtcatgggacagg

SEQ ID NO: 8927 - RNA, 20 nt, synthetic construct
  source 1..20: mol_type = other RNA
tgtaaagtcatgggacaggt

SEQ ID NO: 8928 - RNA, 20 nt, synthetic construct
  source 1..20: mol_type = other RNA
gtaaagtcatgggacaggtg

SEQ ID NO: 8929 - RNA, 20 nt, synthetic construct
  source 1..20: mol_type = other RNA
taaagtcatgggacaggtgg

SEQ ID NO: 8930 - RNA, 20 nt, synthetic construct
  source 1..20: mol_type = other RNA
gtcatgggacaggtgggggc

SEQ ID NO: 8931 - RNA, 20 nt, synthetic construct
  source 1..20: mol_type = other RNA
atgggacaggtgggggcagg

SEQ ID NO: 8932 - RNA, 20 nt, synthetic construct
  source 1..20: mol_type = other RNA
tgggacaggtgggggcagga

SEQ ID NO: 8933 - RNA, 20 nt, synthetic construct
  source 1..20: mol_type = other RNA
ggatgaggaggtggatggga

SEQ ID NO: 8934 - RNA, 20 nt, synthetic construct
  source 1..20: mol_type = other RNA
gggatgaggaggtggatggg

SEQ ID NO: 8935 - RNA, 20 nt, synthetic construct
  source 1..20: mol_type = other RNA
gcagggatgaggaggtggat

SEQ ID NO: 8936 - RNA, 20 nt, synthetic construct
  source 1..20: mol_type = other RNA
ggcagggatgaggaggtgga

SEQ ID NO: 8937 - RNA, 20 nt, synthetic construct
  source 1..20: mol_type = other RNA
ggagggcagggatgaggagg

SEQ ID NO: 8938 - RNA, 20 nt, synthetic construct
  source 1..20: mol_type = other RNA
gtgggagggcagggatgagg

SEQ ID NO: 8939 - RNA, 20 nt, synthetic construct
  source 1..20: mol_type = other RNA
caagtgggagggcagggatg

SEQ ID NO: 8940 - RNA, 20 nt, synthetic construct
  source 1..20: mol_type = other RNA
tgtggccaagtgggagggca

SEQ ID NO: 8941 - RNA, 20 nt, synthetic construct
  source 1..20: mol_type = other RNA
ctgtggccaagtgggagggc

SEQ ID NO: 8942 - RNA, 20 nt, synthetic construct
  source 1..20: mol_type = other RNA
ggtcctgtggccaagtggga

SEQ ID NO: 8943 - RNA, 20 nt, synthetic construct
  source 1..20: mol_type = other RNA
ctcatccctgccctcccact

SEQ ID NO: 8944 - RNA, 20 nt, synthetic construct
  source 1..20: mol_type = other RNA
aggtcctgtggccaagtggg

SEQ ID NO: 8945 - RNA, 20 nt, synthetic construct
  source 1..20: mol_type = other RNA
gttaggtcctgtggccaagt

SEQ ID NO: 8946 - RNA, 20 nt, synthetic construct
  source 1..20: mol_type = other RNA
tgttaggtcctgtggccaag

SEQ ID NO: 8947 - RNA, 20 nt, synthetic construct
  source 1..20: mol_type = other RNA
ctgccctcccacttggccac

SEQ ID NO: 8948 - RNA, 20 nt, synthetic construct
  source 1..20: mol_type = other RNA
gaggatactgttaggtcctg

SEQ ID NO: 8949 - RNA, 20 nt, synthetic construct
  source 1..20: mol_type = other RNA
gtaaataggaggatactgtt

SEQ ID NO: 8950 - RNA, 20 nt, synthetic construct
  source 1..20: mol_type = other RNA
gctacctctcggtaaatagg

SEQ ID NO: 8951 - RNA, 20 nt, synthetic construct
  source 1..20: mol_type = other RNA
taagctacctctcggtaaat

SEQ ID NO: 8952 - RNA, 20 nt, synthetic construct
  source 1..20: mol_type = other RNA
gtatcctcctatttaccgag

SEQ ID NO: 8953 - RNA, 20 nt, synthetic construct
  source 1..20: mol_type = other RNA
gacagacttaagctacctct

SEQ ID NO: 8954 - RNA, 20 nt, synthetic construct
  source 1..20: mol_type = other RNA
tctgggtcataggctgtgaa

SEQ ID NO: 8955 - RNA, 20 nt, synthetic construct
  source 1..20: mol_type = other RNA
caaggagagttctgggtcat

SEQ ID NO: 8956 - RNA, 20 nt, synthetic construct
  source 1..20: mol_type = other RNA
ttgacctcaaggagagttct

SEQ ID NO: 8957 - RNA, 20 nt, synthetic construct
  source 1..20: mol_type = other RNA
tttgacctcaaggagagttc

SEQ ID NO: 8958 - RNA, 20 nt, synthetic construct
  source 1..20: mol_type = other RNA
atgacccagaactctccttg

SEQ ID NO: 8959 - RNA, 20 nt, synthetic construct
  source 1..20: mol_type = other RNA
catgcctcactttgacctca

SEQ ID NO: 8960 - RNA, 20 nt, synthetic construct
  source 1..20: mol_type = other RNA
ctctccttgaggtcaaagtg

SEQ ID NO: 8961 - RNA, 20 nt, synthetic construct
  source 1..20: mol_type = other RNA
caaagtgaggcatgcaagtt

SEQ ID NO: 8962 - RNA, 20 nt, synthetic construct
  source 1..20: mol_type = other RNA
cacagtgagggggagggctc

SEQ ID NO: 8963 - RNA, 20 nt, synthetic construct
  source 1..20: mol_type = other RNA
cggggacacagtgaggggga

SEQ ID NO: 8964 - RNA, 20 nt, synthetic construct
  source 1..20: mol_type = other RNA
gcggggacacagtgaggggg

SEQ ID NO: 8965 - RNA, 20 nt, synthetic construct
  source 1..20: mol_type = other RNA
actgcggggacacagtgagg

SEQ ID NO: 8966 - RNA, 20 nt, synthetic construct
  source 1..20: mol_type = other RNA
gactgcggggacacagtgag

SEQ ID NO: 8967 - RNA, 20 nt, synthetic construct
  source 1..20: mol_type = other RNA
agactgcggggacacagtga

SEQ ID NO: 8968 - RNA, 20 nt, synthetic construct
  source 1..20: mol_type = other RNA
cagactgcggggacacagtg

SEQ ID NO: 8969 - RNA, 20 nt, synthetic construct
  source 1..20: mol_type = other RNA
ttgttctgggacagactgcg

SEQ ID NO: 8970 - RNA, 20 nt, synthetic construct
  source 1..20: mol_type = other RNA
gttgttctgggacagactgc

SEQ ID NO: 8971 - RNA, 20 nt, synthetic construct
  source 1..20: mol_type = other RNA
tgttgttctgggacagactg

SEQ ID NO: 8972 - RNA, 20 nt, synthetic construct
  source 1..20: mol_type = other RNA
caggtcagtgatgttgttct

SEQ ID NO: 8973 - RNA, 20 nt, synthetic construct
  source 1..20: mol_type = other RNA
ccaggtcagtgatgttgttc

SEQ ID NO: 8974 - RNA, 20 nt, synthetic construct
  source 1..20: mol_type = other RNA
ccagaacaacatcactgacc

SEQ ID NO: 8975 - RNA, 20 nt, synthetic construct
  source 1..20: mol_type = other RNA
cagaacaacatcactgacct

SEQ ID NO: 8976 - RNA, 20 nt, synthetic construct
  source 1..20: mol_type = other RNA
cggcgagtttgtaggcaccc

SEQ ID NO: 8977 - RNA, 20 nt, synthetic construct
  source 1..20: mol_type = other RNA
cagggcctcggcgagtttgt

SEQ ID NO: 8978 - RNA, 20 nt, synthetic construct
  source 1..20: mol_type = other RNA
gggtgcctacaaactcgccg

SEQ ID NO: 8979 - RNA, 20 nt, synthetic construct
  source 1..20: mol_type = other RNA
agcgagcgaaggcagggcct

SEQ ID NO: 8980 - RNA, 20 nt, synthetic construct
  source 1..20: mol_type = other RNA
ggatgcagcgagcgaaggca

SEQ ID NO: 8981 - RNA, 20 nt, synthetic construct
  source 1..20: mol_type = other RNA
gggatgcagcgagcgaaggc

SEQ ID NO: 8982 - RNA, 20 nt, synthetic construct
  source 1..20: mol_type = other RNA
agcagggatgcagcgagcga

SEQ ID NO: 8983 - RNA, 20 nt, synthetic construct
  source 1..20: mol_type = other RNA
cgctcgctgcatccctgctc

SEQ ID NO: 8984 - RNA, 20 nt, synthetic construct
  source 1..20: mol_type = other RNA
cactcaccttagcctgagca

SEQ ID NO: 8985 - RNA, 20 nt, synthetic construct
  source 1..20: mol_type = other RNA
ccactcaccttagcctgagc

SEQ ID NO: 8986 - RNA, 20 nt, synthetic construct
  source 1..20: mol_type = other RNA
ctgcatccctgctcaggcta

SEQ ID NO: 8987 - RNA, 20 nt, synthetic construct
  source 1..20: mol_type = other RNA
cctgctcaggctaaggtgag

SEQ ID NO: 8988 - RNA, 20 nt, synthetic construct
  source 1..20: mol_type = other RNA
ctgctcaggctaaggtgagt

SEQ ID NO: 8989 - RNA, 20 nt, synthetic construct
  source 1..20: mol_type = other RNA
tgctcaggctaaggtgagtg

SEQ ID NO: 8990 - RNA, 20 nt, synthetic construct
  source 1..20: mol_type = other RNA
ggctaaggtgagtggggccc

SEQ ID NO: 8991 - RNA, 20 nt, synthetic construct
  source 1..20: mol_type = other RNA
cagcacctgaccggtatccg

SEQ ID NO: 8992 - RNA, 20 nt, synthetic construct
  source 1..20: mol_type = other RNA
gtgagtggggccccggatac

SEQ ID NO: 8993 - RNA, 20 nt, synthetic construct
  source 1..20: mol_type = other RNA
tcagcacctgaccggtatcc

SEQ ID NO: 8994 - RNA, 20 nt, synthetic construct
  source 1..20: mol_type = other RNA
ctcagcacctgaccggtatc

SEQ ID NO: 8995 - RNA, 20 nt, synthetic construct
  source 1..20: mol_type = other RNA
tggggccccggataccggtc

SEQ ID NO: 8996 - RNA, 20 nt, synthetic construct
  source 1..20: mol_type = other RNA
cccccagctcagcacctgac

SEQ ID NO: 8997 - RNA, 20 nt, synthetic construct
  source 1..20: mol_type = other RNA
ataccggtcaggtgctgagc

SEQ ID NO: 8998 - RNA, 20 nt, synthetic construct
  source 1..20: mol_type = other RNA
taccggtcaggtgctgagct

SEQ ID NO: 8999 - RNA, 20 nt, synthetic construct
  source 1..20: mol_type = other RNA
accggtcaggtgctgagctg

SEQ ID NO: 9000 - RNA, 20 nt, synthetic construct
  source 1..20: mol_type = other RNA
ccggtcaggtgctgagctgg

SEQ ID NO: 9001 - RNA, 20 nt, synthetic construct
  source 1..20: mol_type = other RNA
cggtcaggtgctgagctggg

SEQ ID NO: 9002 - RNA, 20 nt, synthetic construct
  source 1..20: mol_type = other RNA
gctggggggctgcagagcgc

SEQ ID NO: 9003 - RNA, 20 nt, synthetic construct
  source 1..20: mol_type = other RNA
ctggggggctgcagagcgca

SEQ ID NO: 9004 - RNA, 20 nt, synthetic construct
  source 1..20: mol_type = other RNA
ccctgcagccagcacgatgt

SEQ ID NO: 9005 - RNA, 20 nt, synthetic construct
  source 1..20: mol_type = other RNA
cccctgcagccagcacgatg

SEQ ID NO: 9006 - RNA, 20 nt, synthetic construct
  source 1..20: mol_type = other RNA
gcagggaacccacatcgtgc

SEQ ID NO: 9007 - RNA, 20 nt, synthetic construct
  source 1..20: mol_type = other RNA
acccacatcgtgctggctgc

SEQ ID NO: 9008 - RNA, 20 nt, synthetic construct
  source 1..20: mol_type = other RNA
cccacatcgtgctggctgca

SEQ ID NO: 9009 - RNA, 20 nt, synthetic construct
  source 1..20: mol_type = other RNA
ccacatcgtgctggctgcag

SEQ ID NO: 9010 - RNA, 20 nt, synthetic construct
  source 1..20: mol_type = other RNA
ggctgtggtgattgcttcta

SEQ ID NO: 9011 - RNA, 20 nt, synthetic construct
  source 1..20: mol_type = other RNA
gggctgtggtgattgcttct

SEQ ID NO: 9012 - RNA, 20 nt, synthetic construct
  source 1..20: mol_type = other RNA
aatccttttgttcagggctg

SEQ ID NO: 9013 - RNA, 20 nt, synthetic construct
  source 1..20: mol_type = other RNA
cccgctaatccttttgttca

SEQ ID NO: 9014 - RNA, 20 nt, synthetic construct
  source 1..20: mol_type = other RNA
tcccgctaatccttttgttc

SEQ ID NO: 9015 - RNA, 20 nt, synthetic construct
  source 1..20: mol_type = other RNA
tcaccacagccctgaacaaa

SEQ ID NO: 9016 - RNA, 20 nt, synthetic construct
  source 1..20: mol_type = other RNA
gccctgaacaaaaggattag

SEQ ID NO: 9017 - RNA, 20 nt, synthetic construct
  source 1..20: mol_type = other RNA
ccctgaacaaaaggattagc

SEQ ID NO: 9018 - RNA, 20 nt, synthetic construct
  source 1..20: mol_type = other RNA
acaaaaggattagcgggacg

SEQ ID NO: 9019 - RNA, 20 nt, synthetic construct
  source 1..20: mol_type = other RNA
caggtaagaaaacagcggct

SEQ ID NO: 9020 - RNA, 20 nt, synthetic construct
  source 1..20: mol_type = other RNA
ttttccaggtaagaaaacag

SEQ ID NO: 9021 - RNA, 20 nt, synthetic construct
  source 1..20: mol_type = other RNA
ctagccgctgttttcttacc

SEQ ID NO: 9022 - RNA, 20 nt, synthetic construct
  source 1..20: mol_type = other RNA
ctgttttcttacctggaaaa

SEQ ID NO: 9023 - RNA, 20 nt, synthetic construct
  source 1..20: mol_type = other RNA
taggatggttcccattttcc

SEQ ID NO: 9024 - RNA, 20 nt, synthetic construct
  source 1..20: mol_type = other RNA
tgttttcttacctggaaaat

SEQ ID NO: 9025 - RNA, 20 nt, synthetic construct
  source 1..20: mol_type = other RNA
gaaaatgggaaccatcctaa

SEQ ID NO: 9026 - RNA, 20 nt, synthetic construct
  source 1..20: mol_type = other RNA
gcttacatagaccattagga

SEQ ID NO: 9027 - RNA, 20 nt, synthetic construct
  source 1..20: mol_type = other RNA
aagtgcttacatagaccatt

SEQ ID NO: 9028 - RNA, 20 nt, synthetic construct
  source 1..20: mol_type = other RNA
taagcacttgtcacaatgcc

SEQ ID NO: 9029 - RNA, 20 nt, synthetic construct
  source 1..20: mol_type = other RNA
atttattgcataacagaacc

SEQ ID NO: 9030 - RNA, 20 nt, synthetic construct
  source 1..20: mol_type = other RNA
cccgccatccctgggggaaa

SEQ ID NO: 9031 - RNA, 20 nt, synthetic construct
  source 1..20: mol_type = other RNA
aatattgctccttttccccc

SEQ ID NO: 9032 - RNA, 20 nt, synthetic construct
  source 1..20: mol_type = other RNA
atattgctccttttccccca

SEQ ID NO: 9033 - RNA, 20 nt, synthetic construct
  source 1..20: mol_type = other RNA
cctggtcccgccatccctgg

SEQ ID NO: 9034 - RNA, 20 nt, synthetic construct
  source 1..20: mol_type = other RNA
tgctccttttcccccaggga

SEQ ID NO: 9035 - RNA, 20 nt, synthetic construct
  source 1..20: mol_type = other RNA
gcctggtcccgccatccctg

SEQ ID NO: 9036 - RNA, 20 nt, synthetic construct
  source 1..20: mol_type = other RNA
agcctggtcccgccatccct

SEQ ID NO: 9037 - RNA, 20 nt, synthetic construct
  source 1..20: mol_type = other RNA
aagcctggtcccgccatccc

SEQ ID NO: 9038 - RNA, 20 nt, synthetic construct
  source 1..20: mol_type = other RNA
tccttttcccccagggatgg

SEQ ID NO: 9039 - RNA, 20 nt, synthetic construct
  source 1..20: mol_type = other RNA
ccttttcccccagggatggc

SEQ ID NO: 9040 - RNA, 20 nt, synthetic construct
  source 1..20: mol_type = other RNA
cccccagggatggcgggacc

SEQ ID NO: 9041 - RNA, 20 nt, synthetic construct
  source 1..20: mol_type = other RNA
cctaggttccggaaaaagcc

SEQ ID NO: 9042 - RNA, 20 nt, synthetic construct
  source 1..20: mol_type = other RNA
tggcgggaccaggctttttc

SEQ ID NO: 9043 - RNA, 20 nt, synthetic construct
  source 1..20: mol_type = other RNA
ccaggctttttccggaacct

SEQ ID NO: 9044 - RNA, 20 nt, synthetic construct
  source 1..20: mol_type = other RNA
aagccaccacccctaggttc

SEQ ID NO: 9045 - RNA, 20 nt, synthetic construct
  source 1..20: mol_type = other RNA
caggctttttccggaaccta

SEQ ID NO: 9046 - RNA, 20 nt, synthetic construct
  source 1..20: mol_type = other RNA
aggctttttccggaacctag

SEQ ID NO: 9047 - RNA, 20 nt, synthetic construct
  source 1..20: mol_type = other RNA
ctttttccggaacctagggg

SEQ ID NO: 9048 - RNA, 20 nt, synthetic construct
  source 1..20: mol_type = other RNA
ttccagaagccaccacccct

SEQ ID NO: 9049 - RNA, 20 nt, synthetic construct
  source 1..20: mol_type = other RNA
tttccggaacctaggggtgg

SEQ ID NO: 9050 - RNA, 20 nt, synthetic construct
  source 1..20: mol_type = other RNA
aacctaggggtggtggcttc

SEQ ID NO: 9051 - RNA, 20 nt, synthetic construct
  source 1..20: mol_type = other RNA
taggggtggtggcttctgga

SEQ ID NO: 9052 - RNA, 20 nt, synthetic construct
  source 1..20: mol_type = other RNA
ccggcaaaagctgacgtacg

SEQ ID NO: 9053 - RNA, 20 nt, synthetic construct
  source 1..20: mol_type = other RNA
ccacgtacgtcagcttttgc

SEQ ID NO: 9054 - RNA, 20 nt, synthetic construct
  source 1..20: mol_type = other RNA
cggcatgtaagtgacaaggc

SEQ ID NO: 9055 - RNA, 20 nt, synthetic construct
  source 1..20: mol_type = other RNA
tgaccggcatgtaagtgaca

SEQ ID NO: 9056 - RNA, 20 nt, synthetic construct
  source 1..20: mol_type = other RNA
cggccttgtcacttacatgc

SEQ ID NO: 9057 - RNA, 20 nt, synthetic construct
  source 1..20: mol_type = other RNA
ggtggcagtgaaacactgac

SEQ ID NO: 9058 - RNA, 20 nt, synthetic construct
  source 1..20: mol_type = other RNA
agtgtttcactgccaccttc

SEQ ID NO: 9059 - RNA, 20 nt, synthetic construct
  source 1..20: mol_type = other RNA
tgccaaggcctaccagaagg

SEQ ID NO: 9060 - RNA, 20 nt, synthetic construct
  source 1..20: mol_type = other RNA
tttcactgccaccttctggt

SEQ ID NO: 9061 - RNA, 20 nt, synthetic construct
  source 1..20: mol_type = other RNA
ctatgccaaggcctaccaga

SEQ ID NO: 9062 - RNA, 20 nt, synthetic construct
  source 1..20: mol_type = other RNA
tgccaccttctggtaggcct

SEQ ID NO: 9063 - RNA, 20 nt, synthetic construct
  source 1..20: mol_type = other RNA
aagcaagaggtgctatgcca

SEQ ID NO: 9064 - RNA, 20 nt, synthetic construct
  source 1..20: mol_type = other RNA
ggaagtcactcaaaagcaag

SEQ ID NO: 9065 - RNA, 20 nt, synthetic construct
  source 1..20: mol_type = other RNA
cttttgagtgacttccatcc

SEQ ID NO: 9066 - RNA, 20 nt, synthetic construct
  source 1..20: mol_type = other RNA
ggaccacaccagggcctgga

SEQ ID NO: 9067 - RNA, 20 nt, synthetic construct
  source 1..20: mol_type = other RNA
agtgacttccatccaggccc

SEQ ID NO: 9068 - RNA, 20 nt, synthetic construct
  source 1..20: mol_type = other RNA
tctgggaccacaccagggcc

SEQ ID NO: 9069 - RNA, 20 nt, synthetic construct
  source 1..20: mol_type = other RNA
cttccatccaggccctggtg

SEQ ID NO: 9070 - RNA, 20 nt, synthetic construct
  source 1..20: mol_type = other RNA
ttacctctgggaccacacca

SEQ ID NO: 9071 - RNA, 20 nt, synthetic construct
  source 1..20: mol_type = other RNA
attacctctgggaccacacc

SEQ ID NO: 9072 - RNA, 20 nt, synthetic construct
  source 1..20: mol_type = other RNA
aggccctggtgtggtcccag

SEQ ID NO: 9073 - RNA, 20 nt, synthetic construct
  source 1..20: mol_type = other RNA
tcagtccgctcattacctct

SEQ ID NO: 9074 - RNA, 20 nt, synthetic construct
  source 1..20: mol_type = other RNA
ctcagtccgctcattacctc

SEQ ID NO: 9075 - RNA, 20 nt, synthetic construct
  source 1..20: mol_type = other RNA
gtggtcccagaggtaatgag

SEQ ID NO: 9076 - RNA, 20 nt, synthetic construct
  source 1..20: mol_type = other RNA
ggtaatgagcggactgagct

SEQ ID NO: 9077 - RNA, 20 nt, synthetic construct
  source 1..20: mol_type = other RNA
gagttggatgactggggctc

SEQ ID NO: 9078 - RNA, 20 nt, synthetic construct
  source 1..20: mol_type = other RNA
aatgctgagttggatgactg

SEQ ID NO: 9079 - RNA, 20 nt, synthetic construct
  source 1..20: mol_type = other RNA
taatgctgagttggatgact

SEQ ID NO: 9080 - RNA, 20 nt, synthetic construct
  source 1..20: mol_type = other RNA
gtaatgctgagttggatgac

SEQ ID NO: 9081 - RNA, 20 nt, synthetic construct
  source 1..20: mol_type = other RNA
aagagctggtaatgctgagt

SEQ ID NO: 9082 - RNA, 20 nt, synthetic construct
  source 1..20: mol_type = other RNA
gtctggcgagtaagaagagc

SEQ ID NO: 9083 - RNA, 20 nt, synthetic construct
  source 1..20: mol_type = other RNA
gagagcagtttctctcagtc

SEQ ID NO: 9084 - RNA, 20 nt, synthetic construct
  source 1..20: mol_type = other RNA
agtgaagagctctggcgaag

SEQ ID NO: 9085 - RNA, 20 nt, synthetic construct
  source 1..20: mol_type = other RNA
cctcagtaagtgaagagctc

SEQ ID NO: 9086 - RNA, 20 nt, synthetic construct
  source 1..20: mol_type = other RNA
ccagagctcttcacttactg

SEQ ID NO: 9087 - RNA, 20 nt, synthetic construct
  source 1..20: mol_type = other RNA
ctttcctgggaatctgactc

SEQ ID NO: 9088 - RNA, 20 nt, synthetic construct
  source 1..20: mol_type = other RNA
acaaccagagtcagattccc

SEQ ID NO: 9089 - RNA, 20 nt, synthetic construct
  source 1..20: mol_type = other RNA
gaccaaatgccatctttcct

SEQ ID NO: 9090 - RNA, 20 nt, synthetic construct
  source 1..20: mol_type = other RNA
ggaccaaatgccatctttcc

SEQ ID NO: 9091 - RNA, 20 nt, synthetic construct
  source 1..20: mol_type = other RNA
agtcagattcccaggaaaga

SEQ ID NO: 9092 - RNA, 20 nt, synthetic construct
  source 1..20: mol_type = other RNA
ttcccaggaaagatggcatt

SEQ ID NO: 9093 - RNA, 20 nt, synthetic construct
  source 1..20: mol_type = other RNA
taaaaataaataaataataa

SEQ ID NO: 9094 - RNA, 20 nt, synthetic construct
  source 1..20: mol_type = other RNA
ttaaaaataaataaataata

SEQ ID NO: 9095 - RNA, 20 nt, synthetic construct
  source 1..20: mol_type = other RNA
tttaatttctgtttttgaga

SEQ ID NO: 9096 - RNA, 20 nt, synthetic construct
  source 1..20: mol_type = other RNA
ggagtctcgctctgtcaccc

SEQ ID NO: 9097 - RNA, 20 nt, synthetic construct
  source 1..20: mol_type = other RNA
tctcgctctgtcacccaggc

SEQ ID NO: 9098 - RNA, 20 nt, synthetic construct
  source 1..20: mol_type = other RNA
acaccacttcactccagcct

SEQ ID NO: 9099 - RNA, 20 nt, synthetic construct
  source 1..20: mol_type = other RNA
cacaccacttcactccagcc

SEQ ID NO: 9100 - RNA, 20 nt, synthetic construct
  source 1..20: mol_type = other RNA
tcacccaggctggagtgaag

SEQ ID NO: 9101 - RNA, 20 nt, synthetic construct
  source 1..20: mol_type = other RNA
tgcaacttctgccccccccc

SEQ ID NO: 9102 - RNA, 20 nt, synthetic construct
  source 1..20: mol_type = other RNA
aatagcttgaacctgggggg

SEQ ID NO: 9103 - RNA, 20 nt, synthetic construct
  source 1..20: mol_type = other RNA
gaatagcttgaacctggggg

SEQ ID NO: 9104 - RNA, 20 nt, synthetic construct
  source 1..20: mol_type = other RNA
cgaatagcttgaacctgggg

SEQ ID NO: 9105 - RNA, 20 nt, synthetic construct
  source 1..20: mol_type = other RNA
gcgaatagcttgaacctggg

SEQ ID NO: 9106 - RNA, 20 nt, synthetic construct
  source 1..20: mol_type = other RNA
ggcgaatagcttgaacctgg

SEQ ID NO: 9107 - RNA, 20 nt, synthetic construct
  source 1..20: mol_type = other RNA
aggcgaatagcttgaacctg

SEQ ID NO: 9108 - RNA, 20 nt, synthetic construct
  source 1..20: mol_type = other RNA
caggcgaatagcttgaacct

SEQ ID NO: 9109 - RNA, 20 nt, synthetic construct
  source 1..20: mol_type = other RNA
gcaggcgaatagcttgaacc

SEQ ID NO: 9110 - RNA, 20 nt, synthetic construct
  source 1..20: mol_type = other RNA
gctactcggagcactgaggc

SEQ ID NO: 9111 - RNA, 20 nt, synthetic construct
  source 1..20: mol_type = other RNA
cccagctactcggagcactg

SEQ ID NO: 9112 - RNA, 20 nt, synthetic construct
  source 1..20: mol_type = other RNA
gcctcagtgctccgagtagc

SEQ ID NO: 9113 - RNA, 20 nt, synthetic construct
  source 1..20: mol_type = other RNA
cgcctataatcccagctact

SEQ ID NO: 9114 - RNA, 20 nt, synthetic construct
  source 1..20: mol_type = other RNA
cctcagtgctccgagtagct

SEQ ID NO: 9115 - RNA, 20 nt, synthetic construct
  source 1..20: mol_type = other RNA
ctccgagtagctgggattat

SEQ ID NO: 9116 - RNA, 20 nt, synthetic construct
  source 1..20: mol_type = other RNA
aactagctggacgtggtggt

SEQ ID NO: 9117 - RNA, 20 nt, synthetic construct
  source 1..20: mol_type = other RNA
aaactagctggacgtggtgg

SEQ ID NO: 9118 - RNA, 20 nt, synthetic construct
  source 1..20: mol_type = other RNA
taaaaactagctggacgtgg

SEQ ID NO: 9119 - RNA, 20 nt, synthetic construct
  source 1..20: mol_type = other RNA
atataaaaactagctggacg

SEQ ID NO: 9120 - RNA, 20 nt, synthetic construct
  source 1..20: mol_type = other RNA
ctaaaaatataaaaactagc

SEQ ID NO: 9121 - RNA, 20 nt, synthetic construct
  source 1..20: mol_type = other RNA
tttatatttttagtagagac

SEQ ID NO: 9122 - RNA, 20 nt, synthetic construct
  source 1..20: mol_type = other RNA
ttatatttttagtagagaca

SEQ ID NO: 9123 - RNA, 20 nt, synthetic construct
  source 1..20: mol_type = other RNA
gagacagggtttcgccatgt

SEQ ID NO: 9124 - RNA, 20 nt, synthetic construct
  source 1..20: mol_type = other RNA
tgagaccagcctggccaaca

SEQ ID NO: 9125 - RNA, 20 nt, synthetic construct
  source 1..20: mol_type = other RNA
agggtttcgccatgttggcc

SEQ ID NO: 9126 - RNA, 20 nt, synthetic construct
  source 1..20: mol_type = other RNA
tttcgccatgttggccaggc

SEQ ID NO: 9127 - RNA, 20 nt, synthetic construct
  source 1..20: mol_type = other RNA
tcaggagtttgagaccagcc

SEQ ID NO: 9128 - RNA, 20 nt, synthetic construct
  source 1..20: mol_type = other RNA
ggtctcaaactcctgatctc

SEQ ID NO: 9129 - RNA, 20 nt, synthetic construct
  source 1..20: mol_type = other RNA
caggtggatcacctgagatc

SEQ ID NO: 9130 - RNA, 20 nt, synthetic construct
  source 1..20: mol_type = other RNA
ctttgggaggccgaggcagg

SEQ ID NO: 9131 - RNA, 20 nt, synthetic construct
  source 1..20: mol_type = other RNA
ctcaggtgatccacctgcct

SEQ ID NO: 9132 - RNA, 20 nt, synthetic construct
  source 1..20: mol_type = other RNA
tcactttgggaggccgaggc

SEQ ID NO: 9133 - RNA, 20 nt, synthetic construct
  source 1..20: mol_type = other RNA
gtactcactttgggaggccg

SEQ ID NO: 9134 - RNA, 20 nt, synthetic construct
  source 1..20: mol_type = other RNA
atcctagtactcactttggg

SEQ ID NO: 9135 - RNA, 20 nt, synthetic construct
  source 1..20: mol_type = other RNA
gtaatcctagtactcacttt

SEQ ID NO: 9136 - RNA, 20 nt, synthetic construct
  source 1..20: mol_type = other RNA
tgtaatcctagtactcactt

SEQ ID NO: 9137 - RNA, 20 nt, synthetic construct
  source 1..20: mol_type = other RNA
ggcctcccaaagtgagtact

SEQ ID NO: 9138 - RNA, 20 nt, synthetic construct
  source 1..20: mol_type = other RNA
aaagtgagtactaggattac

SEQ ID NO: 9139 - RNA, 20 nt, synthetic construct
  source 1..20: mol_type = other RNA
aataagttggccgggcatgg

SEQ ID NO: 9140 - RNA, 20 nt, synthetic construct
  source 1..20: mol_type = other RNA
caggcgtgagccaccatgcc

SEQ ID NO: 9141 - RNA, 20 nt, synthetic construct
  source 1..20: mol_type = other RNA
ataaataagttggccgggca

SEQ ID NO: 9142 - RNA, 20 nt, synthetic construct
  source 1..20: mol_type = other RNA
aataaataaataagttggcc

SEQ ID NO: 9143 - RNA, 20 nt, synthetic construct
  source 1..20: mol_type = other RNA
aaataaataaataagttggc

SEQ ID NO: 9144 - RNA, 20 nt, synthetic construct
  source 1..20: mol_type = other RNA
aaataaataaataaataagt

SEQ ID NO: 9145 - RNA, 20 nt, synthetic construct
  source 1..20: mol_type = other RNA
tatttatttatttatttatt

SEQ ID NO: 9146 - RNA, 20 nt, synthetic construct
  source 1..20: mol_type = other RNA
tttatttatttatttggaga

SEQ ID NO: 9147 - RNA, 20 nt, synthetic construct
  source 1..20: mol_type = other RNA
ttatttatttatttggagat

SEQ ID NO: 9148 - RNA, 20 nt, synthetic construct
  source 1..20: mol_type = other RNA
tatttatttatttggagatg

SEQ ID NO: 9149 - RNA, 20 nt, synthetic construct
  source 1..20: mol_type = other RNA
ttggagatggggtctcaccc

SEQ ID NO: 9150 - RNA, 20 nt, synthetic construct
  source 1..20: mol_type = other RNA
gcacccctgcactacaacct

SEQ ID NO: 9151 - RNA, 20 nt, synthetic construct
  source 1..20: mol_type = other RNA
tgcacccctgcactacaacc

SEQ ID NO: 9152 - RNA, 20 nt, synthetic construct
  source 1..20: mol_type = other RNA
tctcacccaggttgtagtgc

SEQ ID NO: 9153 - RNA, 20 nt, synthetic construct
  source 1..20: mol_type = other RNA
ctcacccaggttgtagtgca

SEQ ID NO: 9154 - RNA, 20 nt, synthetic construct
  source 1..20: mol_type = other RNA
tcacccaggttgtagtgcag

SEQ ID NO: 9155 - RNA, 20 nt, synthetic construct
  source 1..20: mol_type = other RNA
gtagtgcaggggtgcaatga

SEQ ID NO: 9156 - RNA, 20 nt, synthetic construct
  source 1..20: mol_type = other RNA
cgcttcagtccaggtagtcg

SEQ ID NO: 9157 - RNA, 20 nt, synthetic construct
  source 1..20: mol_type = other RNA
tcactacagcctcgactacc

SEQ ID NO: 9158 - RNA, 20 nt, synthetic construct
  source 1..20: mol_type = other RNA
tgggaggttcgcttcagtcc

SEQ ID NO: 9159 - RNA, 20 nt, synthetic construct
  source 1..20: mol_type = other RNA
acttggaaggctgaggtggg

SEQ ID NO: 9160 - RNA, 20 nt, synthetic construct
  source 1..20: mol_type = other RNA
gctacttggaaggctgaggt

SEQ ID NO: 9161 - RNA, 20 nt, synthetic construct
  source 1..20: mol_type = other RNA
agctacttggaaggctgagg

SEQ ID NO: 9162 - RNA, 20 nt, synthetic construct
  source 1..20: mol_type = other RNA
cccagctacttggaaggctg

SEQ ID NO: 9163 - RNA, 20 nt, synthetic construct
  source 1..20: mol_type = other RNA
ataggacccagctacttgga

SEQ ID NO: 9164 - RNA, 20 nt, synthetic construct
  source 1..20: mol_type = other RNA
acctcagccttccaagtagc

SEQ ID NO: 9165 - RNA, 20 nt, synthetic construct
  source 1..20: mol_type = other RNA
gggtataggacccagctact

SEQ ID NO: 9166 - RNA, 20 nt, synthetic construct
  source 1..20: mol_type = other RNA
cctcagccttccaagtagct

SEQ ID NO: 9167 - RNA, 20 nt, synthetic construct
  source 1..20: mol_type = other RNA
aacaaggctcaggagggtat

SEQ ID NO: 9168 - RNA, 20 nt, synthetic construct
  source 1..20: mol_type = other RNA
gaaattaacaaggctcagga

SEQ ID NO: 9169 - RNA, 20 nt, synthetic construct
  source 1..20: mol_type = other RNA
agaaattaacaaggctcagg

SEQ ID NO: 9170 - RNA, 20 nt, synthetic construct
  source 1..20: mol_type = other RNA
ggaagaaattaacaaggctc

SEQ ID NO: 9171 - RNA, 20 nt, synthetic construct
  source 1..20: mol_type = other RNA
atgctgggaagaaattaaca

SEQ ID NO: 9172 - RNA, 20 nt, synthetic construct
  source 1..20: mol_type = other RNA
tgtaaaacagtgatcatgct

SEQ ID NO: 9173 - RNA, 20 nt, synthetic construct
  source 1..20: mol_type = other RNA
ttgtaaaacagtgatcatgc

SEQ ID NO: 9174 - RNA, 20 nt, synthetic construct
  source 1..20: mol_type = other RNA
ttacaatattttatttatgt

SEQ ID NO: 9175 - RNA, 20 nt, synthetic construct
  source 1..20: mol_type = other RNA
aagcaaaaatagaatctgtc

SEQ ID NO: 9176 - RNA, 20 nt, synthetic construct
  source 1..20: mol_type = other RNA
tttgagtttctttgcgtagt

SEQ ID NO: 9177 - RNA, 20 nt, synthetic construct
  source 1..20: mol_type = other RNA
ttctttgcgtagtaggaatt

SEQ ID NO: 9178 - RNA, 20 nt, synthetic construct
  source 1..20: mol_type = other RNA
tgtaaaacagtgattcatgc

SEQ ID NO: 9179 - RNA, 20 nt, synthetic construct
  source 1..20: mol_type = other RNA
gtaaaacagtgattcatgct

SEQ ID NO: 9180 - RNA, 20 nt, synthetic construct
  source 1..20: mol_type = other RNA
aacagtgattcatgctggga

SEQ ID NO: 9181 - RNA, 20 nt, synthetic construct
  source 1..20: mol_type = other RNA
gaaggaaactaacaagcccc

SEQ ID NO: 9182 - RNA, 20 nt, synthetic construct
  source 1..20: mol_type = other RNA
ggaaactaacaagccccagg

SEQ ID NO: 9183 - RNA, 20 nt, synthetic construct
  source 1..20: mol_type = other RNA
gaaactaacaagccccagga

SEQ ID NO: 9184 - RNA, 20 nt, synthetic construct
  source 1..20: mol_type = other RNA
agaagtcctgtaccctcctg

SEQ ID NO: 9185 - RNA, 20 nt, synthetic construct
  source 1..20: mol_type = other RNA
cagaagtcctgtaccctcct

SEQ ID NO: 9186 - RNA, 20 nt, synthetic construct
  source 1..20: mol_type = other RNA
ccagaagtcctgtaccctcc

SEQ ID NO: 9187 - RNA, 20 nt, synthetic construct
  source 1..20: mol_type = other RNA
aacaagccccaggagggtac

SEQ ID NO: 9188 - RNA, 20 nt, synthetic construct
  source 1..20: mol_type = other RNA
ccaggagggtacaggacttc

SEQ ID NO: 9189 - RNA, 20 nt, synthetic construct
  source 1..20: mol_type = other RNA
caggagggtacaggacttct

SEQ ID NO: 9190 - RNA, 20 nt, synthetic construct
  source 1..20: mol_type = other RNA
aggagggtacaggacttctg

SEQ ID NO: 9191 - RNA, 20 nt, synthetic construct
  source 1..20: mol_type = other RNA
ctggggagatgattcttccg

SEQ ID NO: 9192 - RNA, 20 nt, synthetic construct
  source 1..20: mol_type = other RNA
tggggagatgattcttccgt

SEQ ID NO: 9193 - RNA, 20 nt, synthetic construct
  source 1..20: mol_type = other RNA
ttttcccctagagcttccca

SEQ ID NO: 9194 - RNA, 20 nt, synthetic construct
  source 1..20: mol_type = other RNA
attcttccgtgggaagctct

SEQ ID NO: 9195 - RNA, 20 nt, synthetic construct
  source 1..20: mol_type = other RNA
ttcttccgtgggaagctcta

SEQ ID NO: 9196 - RNA, 20 nt, synthetic construct
  source 1..20: mol_type = other RNA
tcttccgtgggaagctctag

SEQ ID NO: 9197 - RNA, 20 nt, synthetic construct
  source 1..20: mol_type = other RNA
gtgggaagctctaggggaaa

SEQ ID NO: 9198 - RNA, 20 nt, synthetic construct
  source 1..20: mol_type = other RNA
ctctaggggaaaaggactct

SEQ ID NO: 9199 - RNA, 20 nt, synthetic construct
  source 1..20: mol_type = other RNA
ctctaggaagaaagaacagc

SEQ ID NO: 9200 - RNA, 20 nt, synthetic construct
  source 1..20: mol_type = other RNA
agaaagaacagcaggtgcaa

SEQ ID NO: 9201 - RNA, 20 nt, synthetic construct
  source 1..20: mol_type = other RNA
gcaggtgcaaaggccctaag

SEQ ID NO: 9202 - RNA, 20 nt, synthetic construct
  source 1..20: mol_type = other RNA
caggtgcaaaggccctaagt

SEQ ID NO: 9203 - RNA, 20 nt, synthetic construct
  source 1..20: mol_type = other RNA
acagccccttttcccactta

SEQ ID NO: 9204 - RNA, 20 nt, synthetic construct
  source 1..20: mol_type = other RNA
cacagccccttttcccactt

SEQ ID NO: 9205 - RNA, 20 nt, synthetic construct
  source 1..20: mol_type = other RNA
caaaggccctaagtgggaaa

SEQ ID NO: 9206 - RNA, 20 nt, synthetic construct
  source 1..20: mol_type = other RNA
aaaggccctaagtgggaaaa

SEQ ID NO: 9207 - RNA, 20 nt, synthetic construct
  source 1..20: mol_type = other RNA
aaggccctaagtgggaaaag

SEQ ID NO: 9208 - RNA, 20 nt, synthetic construct
  source 1..20: mol_type = other RNA
ggaaaaggggctgtgtttta

SEQ ID NO: 9209 - RNA, 20 nt, synthetic construct
  source 1..20: mol_type = other RNA
gaaaaggggctgtgttttaa

SEQ ID NO: 9210 - RNA, 20 nt, synthetic construct
  source 1..20: mol_type = other RNA
gctgtgttttaagggtcaga

SEQ ID NO: 9211 - RNA, 20 nt, synthetic construct
  source 1..20: mol_type = other RNA
ctgtgttttaagggtcagaa

SEQ ID NO: 9212 - RNA, 20 nt, synthetic construct
  source 1..20: mol_type = other RNA
aagggtcagaagggccactg

SEQ ID NO: 9213 - RNA, 20 nt, synthetic construct
  source 1..20: mol_type = other RNA
ttcactacacacagccacag

SEQ ID NO: 9214 - RNA, 20 nt, synthetic construct
  source 1..20: mol_type = other RNA
gtggctgtgtgtagtgaatg

SEQ ID NO: 9215 - RNA, 20 nt, synthetic construct
  source 1..20: mol_type = other RNA
tggctgtgtgtagtgaatga

SEQ ID NO: 9216 - RNA, 20 nt, synthetic construct
  source 1..20: mol_type = other RNA
gtgtagtgaatgagggacag

SEQ ID NO: 9217 - RNA, 20 nt, synthetic construct
  source 1..20: mol_type = other RNA
agtgaatgagggacagaggc

SEQ ID NO: 9218 - RNA, 20 nt, synthetic construct
  source 1..20: mol_type = other RNA
gtgaatgagggacagaggct

SEQ ID NO: 9219 - RNA, 20 nt, synthetic construct
  source 1..20: mol_type = other RNA
gagggacagaggctgggcaa

SEQ ID NO: 9220 - RNA, 20 nt, synthetic construct
  source 1..20: mol_type = other RNA
ggacagaggctgggcaatgg

SEQ ID NO: 9221 - RNA, 20 nt, synthetic construct
  source 1..20: mol_type = other RNA
ggctgggcaatggtggaagt

SEQ ID NO: 9222 - RNA, 20 nt, synthetic construct
  source 1..20: mol_type = other RNA
gctgggcaatggtggaagta

SEQ ID NO: 9223 - RNA, 20 nt, synthetic construct
  source 1..20: mol_type = other RNA
ctgggcaatggtggaagtag

SEQ ID NO: 9224 - RNA, 20 nt, synthetic construct
  source 1..20: mol_type = other RNA
ggcaatggtggaagtagggg

SEQ ID NO: 9225 - RNA, 20 nt, synthetic construct
  source 1..20: mol_type = other RNA
tggtggaagtaggggaggtc

SEQ ID NO: 9226 - RNA, 20 nt, synthetic construct
  source 1..20: mol_type = other RNA
ggtggaagtaggggaggtca

SEQ ID NO: 9227 - RNA, 20 nt, synthetic construct
  source 1..20: mol_type = other RNA
gtggaagtaggggaggtcag

SEQ ID NO: 9228 - RNA, 20 nt, synthetic construct
  source 1..20: mol_type = other RNA
aagggcctccctgtgtgatc

SEQ ID NO: 9229 - RNA, 20 nt, synthetic construct
  source 1..20: mol_type = other RNA
caggggaatccagatcacac

SEQ ID NO: 9230 - RNA, 20 nt, synthetic construct
  source 1..20: mol_type = other RNA
aggggaatccagatcacaca

SEQ ID NO: 9231 - RNA, 20 nt, synthetic construct
  source 1..20: mol_type = other RNA
ggaatccagatcacacaggg

SEQ ID NO: 9232 - RNA, 20 nt, synthetic construct
  source 1..20: mol_type = other RNA
atcacacagggaggcccttg

SEQ ID NO: 9233 - RNA, 20 nt, synthetic construct
  source 1..20: mol_type = other RNA
tcacacagggaggcccttgt

SEQ ID NO: 9234 - RNA, 20 nt, synthetic construct
  source 1..20: mol_type = other RNA
atacctcttgtgacccacaa

SEQ ID NO: 9235 - RNA, 20 nt, synthetic construct
  source 1..20: mol_type = other RNA
aatacctcttgtgacccaca

SEQ ID NO: 9236 - RNA, 20 nt, synthetic construct
  source 1..20: mol_type = other RNA
aggcccttgtgggtcacaag

SEQ ID NO: 9237 - RNA, 20 nt, synthetic construct
  source 1..20: mol_type = other RNA
ttgcagtttttcagtgtgaa

SEQ ID NO: 9238 - RNA, 20 nt, synthetic construct
  source 1..20: mol_type = other RNA
ttcagtgtgaatggaaaagt

SEQ ID NO: 9239 - RNA, 20 nt, synthetic construct
  source 1..20: mol_type = other RNA
agtgtgaatggaaaagtagg

SEQ ID NO: 9240 - RNA, 20 nt, synthetic construct
  source 1..20: mol_type = other RNA
gtgtgaatggaaaagtaggt

SEQ ID NO: 9241 - RNA, 20 nt, synthetic construct
  source 1..20: mol_type = other RNA
aatggaaaagtaggtgggcc

SEQ ID NO: 9242 - RNA, 20 nt, synthetic construct
  source 1..20: mol_type = other RNA
atggaaaagtaggtgggcct

SEQ ID NO: 9243 - RNA, 20 nt, synthetic construct
  source 1..20: mol_type = other RNA
aaaagtaggtgggcctggga

SEQ ID NO: 9244 - RNA, 20 nt, synthetic construct
  source 1..20: mol_type = other RNA
agatcaagtgtcgccttccc

SEQ ID NO: 9245 - RNA, 20 nt, synthetic construct
  source 1..20: mol_type = other RNA
ctgggcaataaagtgagact

SEQ ID NO: 9246 - RNA, 20 nt, synthetic construct
  source 1..20: mol_type = other RNA
caagtctcactttattgccc

SEQ ID NO: 9247 - RNA, 20 nt, synthetic construct
  source 1..20: mol_type = other RNA
tcactttattgcccaggcta

SEQ ID NO: 9248 - RNA, 20 nt, synthetic construct
  source 1..20: mol_type = other RNA
atgccactgcaccttagcct

SEQ ID NO: 9249 - RNA, 20 nt, synthetic construct
  source 1..20: mol_type = other RNA
catgccactgcaccttagcc

SEQ ID NO: 9250 - RNA, 20 nt, synthetic construct
  source 1..20: mol_type = other RNA
ttgcccaggctaaggtgcag

SEQ ID NO: 9251 - RNA, 20 nt, synthetic construct
  source 1..20: mol_type = other RNA
tcactgcaagcactgcctcc

SEQ ID NO: 9252 - RNA, 20 nt, synthetic construct
  source 1..20: mol_type = other RNA
cactgcaagcactgcctcct

SEQ ID NO: 9253 - RNA, 20 nt, synthetic construct
  source 1..20: mol_type = other RNA
gagaatcacttgaacccagg

SEQ ID NO: 9254 - RNA, 20 nt, synthetic construct
  source 1..20: mol_type = other RNA
catgagaatcacttgaaccc

SEQ ID NO: 9255 - RNA, 20 nt, synthetic construct
  source 1..20: mol_type = other RNA
cccagctacttgggaggctg

SEQ ID NO: 9256 - RNA, 20 nt, synthetic construct
  source 1..20: mol_type = other RNA
tgtaatcccagctacttggg

SEQ ID NO: 9257 - RNA, 20 nt, synthetic construct
  source 1..20: mol_type = other RNA
atctgtaatcccagctactt

SEQ ID NO: 9258 - RNA, 20 nt, synthetic construct
  source 1..20: mol_type = other RNA
gcctcagcctcccaagtagc

SEQ ID NO: 9259 - RNA, 20 nt, synthetic construct
  source 1..20: mol_type = other RNA
catctgtaatcccagctact

SEQ ID NO: 9260 - RNA, 20 nt, synthetic construct
  source 1..20: mol_type = other RNA
cctcagcctcccaagtagct

SEQ ID NO: 9261 - RNA, 20 nt, synthetic construct
  source 1..20: mol_type = other RNA
aaatagcctggtgtggtggc

SEQ ID NO: 9262 - RNA, 20 nt, synthetic construct
  source 1..20: mol_type = other RNA
aaaatagcctggtgtggtgg

SEQ ID NO: 9263 - RNA, 20 nt, synthetic construct
  source 1..20: mol_type = other RNA
acaaaaatagcctggtgtgg

SEQ ID NO: 9264 - RNA, 20 nt, synthetic construct
  source 1..20: mol_type = other RNA
cagatgcccgccaccacacc

SEQ ID NO: 9265 - RNA, 20 nt, synthetic construct
  source 1..20: mol_type = other RNA
aacacaaaaatagcctggtg

SEQ ID NO: 9266 - RNA, 20 nt, synthetic construct
  source 1..20: mol_type = other RNA
ctgaaaacacaaaaatagcc

SEQ ID NO: 9267 - RNA, 20 nt, synthetic construct
  source 1..20: mol_type = other RNA
tttgtgttttcagtagagac

SEQ ID NO: 9268 - RNA, 20 nt, synthetic construct
  source 1..20: mol_type = other RNA
ttgtgttttcagtagagaca

SEQ ID NO: 9269 - RNA, 20 nt, synthetic construct
  source 1..20: mol_type = other RNA
agagacagggcttcgccatg

SEQ ID NO: 9270 - RNA, 20 nt, synthetic construct
  source 1..20: mol_type = other RNA
caagaccagtctgggccaca

SEQ ID NO: 9271 - RNA, 20 nt, synthetic construct
  source 1..20: mol_type = other RNA
cttcgccatgtggcccagac

SEQ ID NO: 9272 - RNA, 20 nt, synthetic construct
  source 1..20: mol_type = other RNA
caggatttcaagaccagtct

SEQ ID NO: 9273 - RNA, 20 nt, synthetic construct
  source 1..20: mol_type = other RNA
ccaggatttcaagaccagtc

SEQ ID NO: 9274 - RNA, 20 nt, synthetic construct
  source 1..20: mol_type = other RNA
ccagactggtcttgaaatcc

SEQ ID NO: 9275 - RNA, 20 nt, synthetic construct
  source 1..20: mol_type = other RNA
cagactggtcttgaaatcct

SEQ ID NO: 9276 - RNA, 20 nt, synthetic construct
  source 1..20: mol_type = other RNA
tgggtggatcgcttgggccc

SEQ ID NO: 9277 - RNA, 20 nt, synthetic construct
  source 1..20: mol_type = other RNA
ctgaggtgggtggatcgctt

SEQ ID NO: 9278 - RNA, 20 nt, synthetic construct
  source 1..20: mol_type = other RNA
gctgaggtgggtggatcgct

SEQ ID NO: 9279 - RNA, 20 nt, synthetic construct
  source 1..20: mol_type = other RNA
ctttggaaggctgaggtggg

SEQ ID NO: 9280 - RNA, 20 nt, synthetic construct
  source 1..20: mol_type = other RNA
gcactttggaaggctgaggt

SEQ ID NO: 9281 - RNA, 20 nt, synthetic construct
  source 1..20: mol_type = other RNA
agcactttggaaggctgagg

SEQ ID NO: 9282 - RNA, 20 nt, synthetic construct
  source 1..20: mol_type = other RNA
cccagcactttggaaggctg

SEQ ID NO: 9283 - RNA, 20 nt, synthetic construct
  source 1..20: mol_type = other RNA
cgtaatcccagcactttgga

SEQ ID NO: 9284 - RNA, 20 nt, synthetic construct
  source 1..20: mol_type = other RNA
acctcagccttccaaagtgc

SEQ ID NO: 9285 - RNA, 20 nt, synthetic construct
  source 1..20: mol_type = other RNA
cacccgtaatcccagcactt

SEQ ID NO: 9286 - RNA, 20 nt, synthetic construct
  source 1..20: mol_type = other RNA
cctcagccttccaaagtgct

SEQ ID NO: 9287 - RNA, 20 nt, synthetic construct
  source 1..20: mol_type = other RNA
cttccaaagtgctgggatta

SEQ ID NO: 9288 - RNA, 20 nt, synthetic construct
  source 1..20: mol_type = other RNA
ttccaaagtgctgggattac

SEQ ID NO: 9289 - RNA, 20 nt, synthetic construct
  source 1..20: mol_type = other RNA
gtaaatcaggctgggcatgg

SEQ ID NO: 9290 - RNA, 20 nt, synthetic construct
  source 1..20: mol_type = other RNA
agggtaaatcaggctgggca

SEQ ID NO: 9291 - RNA, 20 nt, synthetic construct
  source 1..20: mol_type = other RNA
cttaaagggtaaatcaggct

SEQ ID NO: 9292 - RNA, 20 nt, synthetic construct
  source 1..20: mol_type = other RNA
tcttaaagggtaaatcaggc

SEQ ID NO: 9293 - RNA, 20 nt, synthetic construct
  source 1..20: mol_type = other RNA
tgtttcttaaagggtaaatc

SEQ ID NO: 9294 - RNA, 20 nt, synthetic construct
  source 1..20: mol_type = other RNA
gaaatatgatgtttcttaaa

SEQ ID NO: 9295 - RNA, 20 nt, synthetic construct
  source 1..20: mol_type = other RNA
tgaaatatgatgtttcttaa

SEQ ID NO: 9296 - RNA, 20 nt, synthetic construct
  source 1..20: mol_type = other RNA
ttaagaaacatcatatttca

SEQ ID NO: 9297 - RNA, 20 nt, synthetic construct
  source 1..20: mol_type = other RNA
tattggggtcttacaatgga

SEQ ID NO: 9298 - RNA, 20 nt, synthetic construct
  source 1..20: mol_type = other RNA
ctcatattggggtcttacaa

SEQ ID NO: 9299 - RNA, 20 nt, synthetic construct
  source 1..20: mol_type = other RNA
tgcattttggcctcatattg

SEQ ID NO: 9300 - RNA, 20 nt, synthetic construct
  source 1..20: mol_type = other RNA
cattgtaagaccccaatatg

SEQ ID NO: 9301 - RNA, 20 nt, synthetic construct
  source 1..20: mol_type = other RNA
ttgcattttggcctcatatt

SEQ ID NO: 9302 - RNA, 20 nt, synthetic construct
  source 1..20: mol_type = other RNA
tttgcattttggcctcatat

SEQ ID NO: 9303 - RNA, 20 nt, synthetic construct
  source 1..20: mol_type = other RNA
gcgtgtcacagtttgcattt

SEQ ID NO: 9304 - RNA, 20 nt, synthetic construct
  source 1..20: mol_type = other RNA
tgcaaactgtgacacgctat

SEQ ID NO: 9305 - RNA, 20 nt, synthetic construct
  source 1..20: mol_type = other RNA
atttgaatatcattgagatc

SEQ ID NO: 9306 - RNA, 20 nt, synthetic construct
  source 1..20: mol_type = other RNA
tgatctcaatgatattcaaa

SEQ ID NO: 9307 - RNA, 20 nt, synthetic construct
  source 1..20: mol_type = other RNA
aaatggtgacatatatgtct

SEQ ID NO: 9308 - RNA, 20 nt, synthetic construct
  source 1..20: mol_type = other RNA
gtcttggcatcgatgaaata

SEQ ID NO: 9309 - RNA, 20 nt, synthetic construct
  source 1..20: mol_type = other RNA
tggtcagattactctccctg

SEQ ID NO: 9310 - RNA, 20 nt, synthetic construct
  source 1..20: mol_type = other RNA
ggtcagattactctccctgt

SEQ ID NO: 9311 - RNA, 20 nt, synthetic construct
  source 1..20: mol_type = other RNA
gtcagattactctccctgtg

SEQ ID NO: 9312 - RNA, 20 nt, synthetic construct
  source 1..20: mol_type = other RNA
gacccttcctccaccccaca

SEQ ID NO: 9313 - RNA, 20 nt, synthetic construct
  source 1..20: mol_type = other RNA
agattactctccctgtgggg

SEQ ID NO: 9314 - RNA, 20 nt, synthetic construct
  source 1..20: mol_type = other RNA
agacccttcctccaccccac

SEQ ID NO: 9315 - RNA, 20 nt, synthetic construct
  source 1..20: mol_type = other RNA
ttactctccctgtggggtgg

SEQ ID NO: 9316 - RNA, 20 nt, synthetic construct
  source 1..20: mol_type = other RNA
tctccctgtggggtggagga

SEQ ID NO: 9317 - RNA, 20 nt, synthetic construct
  source 1..20: mol_type = other RNA
ctccctgtggggtggaggaa

SEQ ID NO: 9318 - RNA, 20 nt, synthetic construct
  source 1..20: mol_type = other RNA
ggggtggaggaagggtctcc

SEQ ID NO: 9319 - RNA, 20 nt, synthetic construct
  source 1..20: mol_type = other RNA
gggtggaggaagggtctcca

SEQ ID NO: 9320 - RNA, 20 nt, synthetic construct
  source 1..20: mol_type = other RNA
gttttgcaatctctgaaccc

SEQ ID NO: 9321 - RNA, 20 nt, synthetic construct
  source 1..20: mol_type = other RNA
ccagtgcagaaactagatgg

SEQ ID NO: 9322 - RNA, 20 nt, synthetic construct
  source 1..20: mol_type = other RNA
accagtgcagaaactagatg

SEQ ID NO: 9323 - RNA, 20 nt, synthetic construct
  source 1..20: mol_type = other RNA
taccagtgcagaaactagat

SEQ ID NO: 9324 - RNA, 20 nt, synthetic construct
  source 1..20: mol_type = other RNA
gtaccagtgcagaaactaga

SEQ ID NO: 9325 - RNA, 20 nt, synthetic construct
  source 1..20: mol_type = other RNA
cccccatctagtttctgcac

SEQ ID NO: 9326 - RNA, 20 nt, synthetic construct
  source 1..20: mol_type = other RNA
tctagtttctgcactggtac

SEQ ID NO: 9327 - RNA, 20 nt, synthetic construct
  source 1..20: mol_type = other RNA
aactcacatcacgggtcggc

SEQ ID NO: 9328 - RNA, 20 nt, synthetic construct
  source 1..20: mol_type = other RNA
aatcaactcacatcacgggt

SEQ ID NO: 9329 - RNA, 20 nt, synthetic construct
  source 1..20: mol_type = other RNA
gctaaatcaactcacatcac

SEQ ID NO: 9330 - RNA, 20 nt, synthetic construct
  source 1..20: mol_type = other RNA
ggctaaatcaactcacatca

SEQ ID NO: 9331 - RNA, 20 nt, synthetic construct
  source 1..20: mol_type = other RNA
cactgctgccaagtggattc

SEQ ID NO: 9332 - RNA, 20 nt, synthetic construct
  source 1..20: mol_type = other RNA
tgatttagcctgaatccact

SEQ ID NO: 9333 - RNA, 20 nt, synthetic construct
  source 1..20: mol_type = other RNA
aggtttacactgctgccaag

SEQ ID NO: 9334 - RNA, 20 nt, synthetic construct
  source 1..20: mol_type = other RNA
aaaaaataaataaatgcagc

SEQ ID NO: 9335 - RNA, 20 nt, synthetic construct
  source 1..20: mol_type = other RNA
gagtttcgctcttgttgcca

SEQ ID NO: 9336 - RNA, 20 nt, synthetic construct
  source 1..20: mol_type = other RNA
aattgcttgaactcgggagg

SEQ ID NO: 9337 - RNA, 20 nt, synthetic construct
  source 1..20: mol_type = other RNA
gagaattgcttgaactcggg

SEQ ID NO: 9338 - RNA, 20 nt, synthetic construct
  source 1..20: mol_type = other RNA
caggagaattgcttgaactc

SEQ ID NO: 9339 - RNA, 20 nt, synthetic construct
  source 1..20: mol_type = other RNA
gcaggagaattgcttgaact

SEQ ID NO: 9340 - RNA, 20 nt, synthetic construct
  source 1..20: mol_type = other RNA
gctacttgagaggctgaggc

SEQ ID NO: 9341 - RNA, 20 nt, synthetic construct
  source 1..20: mol_type = other RNA
cccagctacttgagaggctg

SEQ ID NO: 9342 - RNA, 20 nt, synthetic construct
  source 1..20: mol_type = other RNA
tatactcccagctacttgag

SEQ ID NO: 9343 - RNA, 20 nt, synthetic construct
  source 1..20: mol_type = other RNA
gcctcagcctctcaagtagc

SEQ ID NO: 9344 - RNA, 20 nt, synthetic construct
  source 1..20: mol_type = other RNA
cctcagcctctcaagtagct

SEQ ID NO: 9345 - RNA, 20 nt, synthetic construct
  source 1..20: mol_type = other RNA
tctcaagtagctgggagtat

SEQ ID NO: 9346 - RNA, 20 nt, synthetic construct
  source 1..20: mol_type = other RNA
acaaaattagccgggtgtga

SEQ ID NO: 9347 - RNA, 20 nt, synthetic construct
  source 1..20: mol_type = other RNA
taggcatgtgccatcacacc

SEQ ID NO: 9348 - RNA, 20 nt, synthetic construct
  source 1..20: mol_type = other RNA
ctaaaaatacaaaattagcc

SEQ ID NO: 9349 - RNA, 20 nt, synthetic construct
  source 1..20: mol_type = other RNA
actaaaaatacaaaattagc

SEQ ID NO: 9350 - RNA, 20 nt, synthetic construct
  source 1..20: mol_type = other RNA
ttttgtatttttagtagaga

SEQ ID NO: 9351 - RNA, 20 nt, synthetic construct
  source 1..20: mol_type = other RNA
tttgtatttttagtagagac

SEQ ID NO: 9352 - RNA, 20 nt, synthetic construct
  source 1..20: mol_type = other RNA
ttgtatttttagtagagacg

SEQ ID NO: 9353 - RNA, 20 nt, synthetic construct
  source 1..20: mol_type = other RNA
gagacggggtttctccatgt

SEQ ID NO: 9354 - RNA, 20 nt, synthetic construct
  source 1..20: mol_type = other RNA
tgagaccagcctgaccaaca

SEQ ID NO: 9355 - RNA, 20 nt, synthetic construct
  source 1..20: mol_type = other RNA
ggggtttctccatgttggtc

SEQ ID NO: 9356 - RNA, 20 nt, synthetic construct
  source 1..20: mol_type = other RNA
tttctccatgttggtcaggc

SEQ ID NO: 9357 - RNA, 20 nt, synthetic construct
  source 1..20: mol_type = other RNA
ggtctcaaactcccgacctt

SEQ ID NO: 9358 - RNA, 20 nt, synthetic construct
  source 1..20: mol_type = other RNA
cgggtggatcacctaaggtc

SEQ ID NO: 9359 - RNA, 20 nt, synthetic construct
  source 1..20: mol_type = other RNA
gcgggtggatcacctaaggt

SEQ ID NO: 9360 - RNA, 20 nt, synthetic construct
  source 1..20: mol_type = other RNA
cgaggcgggtggatcaccta

SEQ ID NO: 9361 - RNA, 20 nt, synthetic construct
  source 1..20: mol_type = other RNA
actttggaggccgaggcggg

SEQ ID NO: 9362 - RNA, 20 nt, synthetic construct
  source 1..20: mol_type = other RNA
cttaggtgatccacccgcct

SEQ ID NO: 9363 - RNA, 20 nt, synthetic construct
  source 1..20: mol_type = other RNA
aacactttggaggccgaggc

SEQ ID NO: 9364 - RNA, 20 nt, synthetic construct
  source 1..20: mol_type = other RNA
taacactttggaggccgagg

SEQ ID NO: 9365 - RNA, 20 nt, synthetic construct
  source 1..20: mol_type = other RNA
tcctaacactttggaggccg

SEQ ID NO: 9366 - RNA, 20 nt, synthetic construct
  source 1..20: mol_type = other RNA
ctgtaatcctaacactttgg

SEQ ID NO: 9367 - RNA, 20 nt, synthetic construct
  source 1..20: mol_type = other RNA
cgcctgtaatcctaacactt

SEQ ID NO: 9368 - RNA, 20 nt, synthetic construct
  source 1..20: mol_type = other RNA
gcctcggcctccaaagtgtt

SEQ ID NO: 9369 - RNA, 20 nt, synthetic construct
  source 1..20: mol_type = other RNA
ctccaaagtgttaggattac

SEQ ID NO: 9370 - RNA, 20 nt, synthetic construct
  source 1..20: mol_type = other RNA
tataaaagcagcaggtgcag

SEQ ID NO: 9371 - RNA, 20 nt, synthetic construct
  source 1..20: mol_type = other RNA
gggctgcatataaaagcagc

SEQ ID NO: 9372 - RNA, 20 nt, synthetic construct
  source 1..20: mol_type = other RNA
cttttatatgcagccctgca

SEQ ID NO: 9373 - RNA, 20 nt, synthetic construct
  source 1..20: mol_type = other RNA
ttttatatgcagccctgcaa

SEQ ID NO: 9374 - RNA, 20 nt, synthetic construct
  source 1..20: mol_type = other RNA
agcctcagaactcccttgca

SEQ ID NO: 9375 - RNA, 20 nt, synthetic construct
  source 1..20: mol_type = other RNA
cagcctcagaactcccttgc

SEQ ID NO: 9376 - RNA, 20 nt, synthetic construct
  source 1..20: mol_type = other RNA
agccctgcaagggagttctg

SEQ ID NO: 9377 - RNA, 20 nt, synthetic construct
  source 1..20: mol_type = other RNA
ggagttctgaggctgaatca

SEQ ID NO: 9378 - RNA, 20 nt, synthetic construct
  source 1..20: mol_type = other RNA
gctgaatcatggcaaagtca

SEQ ID NO: 9379 - RNA, 20 nt, synthetic construct
  source 1..20: mol_type = other RNA
ctgctgcgggtatgatttca

SEQ ID NO: 9380 - RNA, 20 nt, synthetic construct
  source 1..20: mol_type = other RNA
gctgctgcgggtatgatttc

SEQ ID NO: 9381 - RNA, 20 nt, synthetic construct
  source 1..20: mol_type = other RNA
aacaggtcaggtgctgctgc

SEQ ID NO: 9382 - RNA, 20 nt, synthetic construct
  source 1..20: mol_type = other RNA
taacaggtcaggtgctgctg

SEQ ID NO: 9383 - RNA, 20 nt, synthetic construct
  source 1..20: mol_type = other RNA
aagcagccttttaacaggtc

SEQ ID NO: 9384 - RNA, 20 nt, synthetic construct
  source 1..20: mol_type = other RNA
gcagcacctgacctgttaaa

SEQ ID NO: 9385 - RNA, 20 nt, synthetic construct
  source 1..20: mol_type = other RNA
acaccaagcagccttttaac

SEQ ID NO: 9386 - RNA, 20 nt, synthetic construct
  source 1..20: mol_type = other RNA
tgacctgttaaaaggctgct

SEQ ID NO: 9387 - RNA, 20 nt, synthetic construct
  source 1..20: mol_type = other RNA
gtcgagtaaacagctgaagt

SEQ ID NO: 9388 - RNA, 20 nt, synthetic construct
  source 1..20: mol_type = other RNA
attttcactgctactaatgc

SEQ ID NO: 9389 - RNA, 20 nt, synthetic construct
  source 1..20: mol_type = other RNA
tgtgaatatgctgcagaaac

SEQ ID NO: 9390 - RNA, 20 nt, synthetic construct
  source 1..20: mol_type = other RNA
tatgctgcagaaactggagc

SEQ ID NO: 9391 - RNA, 20 nt, synthetic construct
  source 1..20: mol_type = other RNA
actggagctggtccagtgac

SEQ ID NO: 9392 - RNA, 20 nt, synthetic construct
  source 1..20: mol_type = other RNA
gaagagaaaaagccagtcac

SEQ ID NO: 9393 - RNA, 20 nt, synthetic construct
  source 1..20: mol_type = other RNA
gtgtgaccagcactgggggc

SEQ ID NO: 9394 - RNA, 20 nt, synthetic construct
  source 1..20: mol_type = other RNA
gagggtgtgaccagcactgg

SEQ ID NO: 9395 - RNA, 20 nt, synthetic construct
  source 1..20: mol_type = other RNA
tctcttcctgcccccagtgc

SEQ ID NO: 9396 - RNA, 20 nt, synthetic construct
  source 1..20: mol_type = other RNA
agagggtgtgaccagcactg

SEQ ID NO: 9397 - RNA, 20 nt, synthetic construct
  source 1..20: mol_type = other RNA
tagagggtgtgaccagcact

SEQ ID NO: 9398 - RNA, 20 nt, synthetic construct
  source 1..20: mol_type = other RNA
atagagggtgtgaccagcac

SEQ ID NO: 9399 - RNA, 20 nt, synthetic construct
  source 1..20: mol_type = other RNA
gtcgcatgagttaacataga

SEQ ID NO: 9400 - RNA, 20 nt, synthetic construct
  source 1..20: mol_type = other RNA
ggtcgcatgagttaacatag

SEQ ID NO: 9401 - RNA, 20 nt, synthetic construct
  source 1..20: mol_type = other RNA
catcacaggaacattggtga

SEQ ID NO: 9402 - RNA, 20 nt, synthetic construct
  source 1..20: mol_type = other RNA
acatcacaggaacattggtg

SEQ ID NO: 9403 - RNA, 20 nt, synthetic construct
  source 1..20: mol_type = other RNA
tgactacatcacaggaacat

SEQ ID NO: 9404 - RNA, 20 nt, synthetic construct
  source 1..20: mol_type = other RNA
tatggttctgactacatcac

SEQ ID NO: 9405 - RNA, 20 nt, synthetic construct
  source 1..20: mol_type = other RNA
aatgaactaaatgttagcta

SEQ ID NO: 9406 - RNA, 20 nt, synthetic construct
  source 1..20: mol_type = other RNA
gctaacatttagttcattct

SEQ ID NO: 9407 - RNA, 20 nt, synthetic construct
  source 1..20: mol_type = other RNA
ttagttcattctaggcacca

SEQ ID NO: 9408 - RNA, 20 nt, synthetic construct
  source 1..20: mol_type = other RNA
ataacatttagaacatgcct

SEQ ID NO: 9409 - RNA, 20 nt, synthetic construct
  source 1..20: mol_type = other RNA
atgatagagtcattgtgggg

SEQ ID NO: 9410 - RNA, 20 nt, synthetic construct
  source 1..20: mol_type = other RNA
ggcatgatagagtcattgtg

SEQ ID NO: 9411 - RNA, 20 nt, synthetic construct
  source 1..20: mol_type = other RNA
gggcatgatagagtcattgt

SEQ ID NO: 9412 - RNA, 20 nt, synthetic construct
  source 1..20: mol_type = other RNA
tgggcatgatagagtcattg

SEQ ID NO: 9413 - RNA, 20 nt, synthetic construct
  source 1..20: mol_type = other RNA
agtttgcccatctgtaaaat

SEQ ID NO: 9414 - RNA, 20 nt, synthetic construct
  source 1..20: mol_type = other RNA
cagtttgcccatctgtaaaa

SEQ ID NO: 9415 - RNA, 20 nt, synthetic construct
  source 1..20: mol_type = other RNA
tatcatgcccattttacaga

SEQ ID NO: 9416 - RNA, 20 nt, synthetic construct
  source 1..20: mol_type = other RNA
atcatgcccattttacagat

SEQ ID NO: 9417 - RNA, 20 nt, synthetic construct
  source 1..20: mol_type = other RNA
agagttgagtagcttgccca

SEQ ID NO: 9418 - RNA, 20 nt, synthetic construct
  source 1..20: mol_type = other RNA
cttactgcctatgtgacctt

SEQ ID NO: 9419 - RNA, 20 nt, synthetic construct
  source 1..20: mol_type = other RNA
tcttactgcctatgtgacct

SEQ ID NO: 9420 - RNA, 20 nt, synthetic construct
  source 1..20: mol_type = other RNA
tagcttgcccaaggtcacat

SEQ ID NO: 9421 - RNA, 20 nt, synthetic construct
  source 1..20: mol_type = other RNA
aaggtcacataggcagtaag

SEQ ID NO: 9422 - RNA, 20 nt, synthetic construct
  source 1..20: mol_type = other RNA
taggcagtaagaggcatagc

SEQ ID NO: 9423 - RNA, 20 nt, synthetic construct
  source 1..20: mol_type = other RNA
aggcagtaagaggcatagct

SEQ ID NO: 9424 - RNA, 20 nt, synthetic construct
  source 1..20: mol_type = other RNA
gcatagctgggatttgaact

SEQ ID NO: 9425 - RNA, 20 nt, synthetic construct
  source 1..20: mol_type = other RNA
catagctgggatttgaactt

SEQ ID NO: 9426 - RNA, 20 nt, synthetic construct
  source 1..20: mol_type = other RNA
tcatttcttgccttactgtg

SEQ ID NO: 9427 - RNA, 20 nt, synthetic construct
  source 1..20: mol_type = other RNA
ctgacagtttccacacagta

SEQ ID NO: 9428 - RNA, 20 nt, synthetic construct
  source 1..20: mol_type = other RNA
aggaaaacagcaggactaaa

SEQ ID NO: 9429 - RNA, 20 nt, synthetic construct
  source 1..20: mol_type = other RNA
agtgagcccaggaaaacagc

SEQ ID NO: 9430 - RNA, 20 nt, synthetic construct
  source 1..20: mol_type = other RNA
ttttagtcctgctgttttcc

SEQ ID NO: 9431 - RNA, 20 nt, synthetic construct
  source 1..20: mol_type = other RNA
tttagtcctgctgttttcct

SEQ ID NO: 9432 - RNA, 20 nt, synthetic construct
  source 1..20: mol_type = other RNA
tgtggtcaaacagtgagccc

SEQ ID NO: 9433 - RNA, 20 nt, synthetic construct
  source 1..20: mol_type = other RNA
gagttgagaccacttctctg

SEQ ID NO: 9434 - RNA, 20 nt, synthetic construct
  source 1..20: mol_type = other RNA
actgtttgaccacagagaag

SEQ ID NO: 9435 - RNA, 20 nt, synthetic construct
  source 1..20: mol_type = other RNA
gagaagtggtctcaactctc

SEQ ID NO: 9436 - RNA, 20 nt, synthetic construct
  source 1..20: mol_type = other RNA
agaagtggtctcaactctct

SEQ ID NO: 9437 - RNA, 20 nt, synthetic construct
  source 1..20: mol_type = other RNA
ggtctcaactctctgggtct

SEQ ID NO: 9438 - RNA, 20 nt, synthetic construct
  source 1..20: mol_type = other RNA
tactgccccattttaaagac

SEQ ID NO: 9439 - RNA, 20 nt, synthetic construct
  source 1..20: mol_type = other RNA
tggtttgcctgtctttaaaa

SEQ ID NO: 9440 - RNA, 20 nt, synthetic construct
  source 1..20: mol_type = other RNA
ggtttgcctgtctttaaaat

SEQ ID NO: 9441 - RNA, 20 nt, synthetic construct
  source 1..20: mol_type = other RNA
gtttgcctgtctttaaaatg

SEQ ID NO: 9442 - RNA, 20 nt, synthetic construct
  source 1..20: mol_type = other RNA
aatggggcagtaatcccagt

SEQ ID NO: 9443 - RNA, 20 nt, synthetic construct
  source 1..20: mol_type = other RNA
ggggcagtaatcccagtagg

SEQ ID NO: 9444 - RNA, 20 nt, synthetic construct
  source 1..20: mol_type = other RNA
cgtgggagtcaccacctact

SEQ ID NO: 9445 - RNA, 20 nt, synthetic construct
  source 1..20: mol_type = other RNA
ccgtgggagtcaccacctac

SEQ ID NO: 9446 - RNA, 20 nt, synthetic construct
  source 1..20: mol_type = other RNA
ccagtaggtggtgactccca

SEQ ID NO: 9447 - RNA, 20 nt, synthetic construct
  source 1..20: mol_type = other RNA
cagtaggtggtgactcccac

SEQ ID NO: 9448 - RNA, 20 nt, synthetic construct
  source 1..20: mol_type = other RNA
agtaggtggtgactcccacg

SEQ ID NO: 9449 - RNA, 20 nt, synthetic construct
  source 1..20: mol_type = other RNA
agcctggaggtcagccccgt

SEQ ID NO: 9450 - RNA, 20 nt, synthetic construct
  source 1..20: mol_type = other RNA
cagcctggaggtcagccccg

SEQ ID NO: 9451 - RNA, 20 nt, synthetic construct
  source 1..20: mol_type = other RNA
ctcccacggggctgacctcc

SEQ ID NO: 9452 - RNA, 20 nt, synthetic construct
  source 1..20: mol_type = other RNA
cagtgtcccctgcagcctgg

SEQ ID NO: 9453 - RNA, 20 nt, synthetic construct
  source 1..20: mol_type = other RNA
ggggctgacctccaggctgc

SEQ ID NO: 9454 - RNA, 20 nt, synthetic construct
  source 1..20: mol_type = other RNA
tctcagtgtcccctgcagcc

SEQ ID NO: 9455 - RNA, 20 nt, synthetic construct
  source 1..20: mol_type = other RNA
gggctgacctccaggctgca

SEQ ID NO: 9456 - RNA, 20 nt, synthetic construct
  source 1..20: mol_type = other RNA
ggctgacctccaggctgcag

SEQ ID NO: 9457 - RNA, 20 nt, synthetic construct
  source 1..20: mol_type = other RNA
gggctgtggtgattgcttct

SEQ ID NO: 9458 - RNA, 20 nt, synthetic construct
  source 1..20: mol_type = other RNA
agttctcttgttcagggctg

SEQ ID NO: 9459 - RNA, 20 nt, synthetic construct
  source 1..20: mol_type = other RNA
cccactagttctcttgttca

SEQ ID NO: 9460 - RNA, 20 nt, synthetic construct
  source 1..20: mol_type = other RNA
tcccactagttctcttgttc

SEQ ID NO: 9461 - RNA, 20 nt, synthetic construct
  source 1..20: mol_type = other RNA
gccctgaacaagagaactag

SEQ ID NO: 9462 - RNA, 20 nt, synthetic construct
  source 1..20: mol_type = other RNA
ccctgaacaagagaactagt

SEQ ID NO: 9463 - RNA, 20 nt, synthetic construct
  source 1..20: mol_type = other RNA
acaagagaactagtgggacc

SEQ ID NO: 9464 - RNA, 20 nt, synthetic construct
  source 1..20: mol_type = other RNA
caagagaactagtgggacct

SEQ ID NO: 9465 - RNA, 20 nt, synthetic construct
  source 1..20: mol_type = other RNA
aagagaactagtgggacctg

SEQ ID NO: 9466 - RNA, 20 nt, synthetic construct
  source 1..20: mol_type = other RNA
tgctcaaagtttctgtcccc

SEQ ID NO: 9467 - RNA, 20 nt, synthetic construct
  source 1..20: mol_type = other RNA
tagatatgaaaatagaggct

SEQ ID NO: 9468 - RNA, 20 nt, synthetic construct
  source 1..20: mol_type = other RNA
ttttctagatatgaaaatag

SEQ ID NO: 9469 - RNA, 20 nt, synthetic construct
  source 1..20: mol_type = other RNA
ctattttcatatctagaaaa

SEQ ID NO: 9470 - RNA, 20 nt, synthetic construct
  source 1..20: mol_type = other RNA
tattttcatatctagaaaat

SEQ ID NO: 9471 - RNA, 20 nt, synthetic construct
  source 1..20: mol_type = other RNA
gaaaatgggaaccatcccaa

SEQ ID NO: 9472 - RNA, 20 nt, synthetic construct
  source 1..20: mol_type = other RNA
acttacataggccattggga

SEQ ID NO: 9473 - RNA, 20 nt, synthetic construct
  source 1..20: mol_type = other RNA
aagtacttacataggccatt

SEQ ID NO: 9474 - RNA, 20 nt, synthetic construct
  source 1..20: mol_type = other RNA
caagtacttacataggccat

SEQ ID NO: 9475 - RNA, 20 nt, synthetic construct
  source 1..20: mol_type = other RNA
attgtgccaagtacttacat

SEQ ID NO: 9476 - RNA, 20 nt, synthetic construct
  source 1..20: mol_type = other RNA
caatggcctatgtaagtact

SEQ ID NO: 9477 - RNA, 20 nt, synthetic construct
  source 1..20: mol_type = other RNA
taagtacttggcacaatgcc

SEQ ID NO: 9478 - RNA, 20 nt, synthetic construct
  source 1..20: mol_type = other RNA
atttattgcacaacagagcc

SEQ ID NO: 9479 - RNA, 20 nt, synthetic construct
  source 1..20: mol_type = other RNA
aaatattgattccttccccc

SEQ ID NO: 9480 - RNA, 20 nt, synthetic construct
  source 1..20: mol_type = other RNA
gtcccactatccctggggga

SEQ ID NO: 9481 - RNA, 20 nt, synthetic construct
  source 1..20: mol_type = other RNA
aatattgattccttccccca

SEQ ID NO: 9482 - RNA, 20 nt, synthetic construct
  source 1..20: mol_type = other RNA
cctggtcccactatccctgg

SEQ ID NO: 9483 - RNA, 20 nt, synthetic construct
  source 1..20: mol_type = other RNA
gcctggtcccactatccctg

SEQ ID NO: 9484 - RNA, 20 nt, synthetic construct
  source 1..20: mol_type = other RNA
agcctggtcccactatccct

SEQ ID NO: 9485 - RNA, 20 nt, synthetic construct
  source 1..20: mol_type = other RNA
aagcctggtcccactatccc

SEQ ID NO: 9486 - RNA, 20 nt, synthetic construct
  source 1..20: mol_type = other RNA
attccttcccccagggatag

SEQ ID NO: 9487 - RNA, 20 nt, synthetic construct
  source 1..20: mol_type = other RNA
ttccttcccccagggatagt

SEQ ID NO: 9488 - RNA, 20 nt, synthetic construct
  source 1..20: mol_type = other RNA
cccccagggatagtgggacc

SEQ ID NO: 9489 - RNA, 20 nt, synthetic construct
  source 1..20: mol_type = other RNA
cctagattccagaaaaagcc

SEQ ID NO: 9490 - RNA, 20 nt, synthetic construct
  source 1..20: mol_type = other RNA
tagtgggaccaggctttttc

SEQ ID NO: 9491 - RNA, 20 nt, synthetic construct
  source 1..20: mol_type = other RNA
ccaggctttttctggaatct

SEQ ID NO: 9492 - RNA, 20 nt, synthetic construct
  source 1..20: mol_type = other RNA
caggctttttctggaatcta

SEQ ID NO: 9493 - RNA, 20 nt, synthetic construct
  source 1..20: mol_type = other RNA
ctttttctggaatctaggga

SEQ ID NO: 9494 - RNA, 20 nt, synthetic construct
  source 1..20: mol_type = other RNA
tttctggaatctagggatgg

SEQ ID NO: 9495 - RNA, 20 nt, synthetic construct
  source 1..20: mol_type = other RNA
aatctagggatggtggcttc

SEQ ID NO: 9496 - RNA, 20 nt, synthetic construct
  source 1..20: mol_type = other RNA
tagggatggtggcttctgga

SEQ ID NO: 9497 - RNA, 20 nt, synthetic construct
  source 1..20: mol_type = other RNA
ctggaaggctgaccatgcac

SEQ ID NO: 9498 - RNA, 20 nt, synthetic construct
  source 1..20: mol_type = other RNA
agggattggaggcctgtgca

SEQ ID NO: 9499 - RNA, 20 nt, synthetic construct
  source 1..20: mol_type = other RNA
aggccagggggagggattgg

SEQ ID NO: 9500 - RNA, 20 nt, synthetic construct
  source 1..20: mol_type = other RNA
cagaggccagggggagggat

SEQ ID NO: 9501 - RNA, 20 nt, synthetic construct
  source 1..20: mol_type = other RNA
aggcctccaatccctccccc

SEQ ID NO: 9502 - RNA, 20 nt, synthetic construct
  source 1..20: mol_type = other RNA
ggaaacagaggccaggggga

SEQ ID NO: 9503 - RNA, 20 nt, synthetic construct
  source 1..20: mol_type = other RNA
cggaaacagaggccaggggg

SEQ ID NO: 9504 - RNA, 20 nt, synthetic construct
  source 1..20: mol_type = other RNA
tgtcggaaacagaggccagg

SEQ ID NO: 9505 - RNA, 20 nt, synthetic construct
  source 1..20: mol_type = other RNA
ctgtcggaaacagaggccag

SEQ ID NO: 9506 - RNA, 20 nt, synthetic construct
  source 1..20: mol_type = other RNA
gctgtcggaaacagaggcca

SEQ ID NO: 9507 - RNA, 20 nt, synthetic construct
  source 1..20: mol_type = other RNA
agctgtcggaaacagaggcc

SEQ ID NO: 9508 - RNA, 20 nt, synthetic construct
  source 1..20: mol_type = other RNA
gtacaagctgtcggaaacag

SEQ ID NO: 9509 - RNA, 20 nt, synthetic construct
  source 1..20: mol_type = other RNA
gcagttattgtacaagctgt

SEQ ID NO: 9510 - RNA, 20 nt, synthetic construct
  source 1..20: mol_type = other RNA
caataactgcatctgcgacg

SEQ ID NO: 9511 - RNA, 20 nt, synthetic construct
  source 1..20: mol_type = other RNA
aataactgcatctgcgacgt

SEQ ID NO: 9512 - RNA, 20 nt, synthetic construct
  source 1..20: mol_type = other RNA
cgacgtgggagccgagagct

SEQ ID NO: 9513 - RNA, 20 nt, synthetic construct
  source 1..20: mol_type = other RNA
aagcacacgagccaagctct

SEQ ID NO: 9514 - RNA, 20 nt, synthetic construct
  source 1..20: mol_type = other RNA
gagcttggctcgtgtgcttc

SEQ ID NO: 9515 - RNA, 20 nt, synthetic construct
  source 1..20: mol_type = other RNA
ggctcgtgtgcttccggaca

SEQ ID NO: 9516 - RNA, 20 nt, synthetic construct
  source 1..20: mol_type = other RNA
acccggagggacaccatgtc

SEQ ID NO: 9517 - RNA, 20 nt, synthetic construct
  source 1..20: mol_type = other RNA
ttccggacatggtgtccctc

SEQ ID NO: 9518 - RNA, 20 nt, synthetic construct
  source 1..20: mol_type = other RNA
tccggacatggtgtccctcc

SEQ ID NO: 9519 - RNA, 20 nt, synthetic construct
  source 1..20: mol_type = other RNA
cactcactccatcacccgga

SEQ ID NO: 9520 - RNA, 20 nt, synthetic construct
  source 1..20: mol_type = other RNA
acactcactccatcacccgg

SEQ ID NO: 9521 - RNA, 20 nt, synthetic construct
  source 1..20: mol_type = other RNA
catggtgtccctccgggtga

SEQ ID NO: 9522 - RNA, 20 nt, synthetic construct
  source 1..20: mol_type = other RNA
cccacactcactccatcacc

SEQ ID NO: 9523 - RNA, 20 nt, synthetic construct
  source 1..20: mol_type = other RNA
tccgggtgatggagtgagtg

SEQ ID NO: 9524 - RNA, 20 nt, synthetic construct
  source 1..20: mol_type = other RNA
ccgggtgatggagtgagtgt

SEQ ID NO: 9525 - RNA, 20 nt, synthetic construct
  source 1..20: mol_type = other RNA
atggagtgagtgtgggagtc

SEQ ID NO: 9526 - RNA, 20 nt, synthetic construct
  source 1..20: mol_type = other RNA
tggagtgagtgtgggagtct

SEQ ID NO: 9527 - RNA, 20 nt, synthetic construct
  source 1..20: mol_type = other RNA
agtgagtgtgggagtctggg

SEQ ID NO: 9528 - RNA, 20 nt, synthetic construct
  source 1..20: mol_type = other RNA
gagtgtgggagtctgggcgg

SEQ ID NO: 9529 - RNA, 20 nt, synthetic construct
  source 1..20: mol_type = other RNA
agtgtgggagtctgggcggt

SEQ ID NO: 9530 - RNA, 20 nt, synthetic construct
  source 1..20: mol_type = other RNA
gtgggagtctgggcggtggg

SEQ ID NO: 9531 - RNA, 20 nt, synthetic construct
  source 1..20: mol_type = other RNA
gggcggtgggtggctcagcc

SEQ ID NO: 9532 - RNA, 20 nt, synthetic construct
  source 1..20: mol_type = other RNA
ggcggtgggtggctcagccc

SEQ ID NO: 9533 - RNA, 20 nt, synthetic construct
  source 1..20: mol_type = other RNA
gcggtgggtggctcagcccg

SEQ ID NO: 9534 - RNA, 20 nt, synthetic construct
  source 1..20: mol_type = other RNA
gtgggtggctcagcccgggg

SEQ ID NO: 9535 - RNA, 20 nt, synthetic construct
  source 1..20: mol_type = other RNA
tgggtggctcagcccggggt

SEQ ID NO: 9536 - RNA, 20 nt, synthetic construct
  source 1..20: mol_type = other RNA
acttcagtgtctcccacccc

SEQ ID NO: 9537 - RNA, 20 nt, synthetic construct
  source 1..20: mol_type = other RNA
gacttcagtgtctcccaccc

SEQ ID NO: 9538 - RNA, 20 nt, synthetic construct
  source 1..20: mol_type = other RNA
gagacactgaagtctctccc

SEQ ID NO: 9539 - RNA, 20 nt, synthetic construct
  source 1..20: mol_type = other RNA
ccagctcttccaggacacca

SEQ ID NO: 9540 - RNA, 20 nt, synthetic construct
  source 1..20: mol_type = other RNA
tccagctcttccaggacacc

SEQ ID NO: 9541 - RNA, 20 nt, synthetic construct
  source 1..20: mol_type = other RNA
gaagtctctccctggtgtcc

SEQ ID NO: 9542 - RNA, 20 nt, synthetic construct
  source 1..20: mol_type = other RNA
cccccacatccagctcttcc

SEQ ID NO: 9543 - RNA, 20 nt, synthetic construct
  source 1..20: mol_type = other RNA
ccctggtgtcctggaagagc

SEQ ID NO: 9544 - RNA, 20 nt, synthetic construct
  source 1..20: mol_type = other RNA
tgtcctggaagagctggatg

SEQ ID NO: 9545 - RNA, 20 nt, synthetic construct
  source 1..20: mol_type = other RNA
gtcctggaagagctggatgt

SEQ ID NO: 9546 - RNA, 20 nt, synthetic construct
  source 1..20: mol_type = other RNA
tcctggaagagctggatgtg

SEQ ID NO: 9547 - RNA, 20 nt, synthetic construct
  source 1..20: mol_type = other RNA
cctggaagagctggatgtgg

SEQ ID NO: 9548 - RNA, 20 nt, synthetic construct
  source 1..20: mol_type = other RNA
ggaagagctggatgtggggg

SEQ ID NO: 9549 - RNA, 20 nt, synthetic construct
  source 1..20: mol_type = other RNA
gctggatgtgggggtggcct

SEQ ID NO: 9550 - RNA, 20 nt, synthetic construct
  source 1..20: mol_type = other RNA
atgtgggggtggccttggtc

SEQ ID NO: 9551 - RNA, 20 nt, synthetic construct
  source 1..20: mol_type = other RNA
gactccccagctccagacca

SEQ ID NO: 9552 - RNA, 20 nt, synthetic construct
  source 1..20: mol_type = other RNA
gggtggccttggtctggagc

SEQ ID NO: 9553 - RNA, 20 nt, synthetic construct
  source 1..20: mol_type = other RNA
ggtggccttggtctggagct

SEQ ID NO: 9554 - RNA, 20 nt, synthetic construct
  source 1..20: mol_type = other RNA
gtggccttggtctggagctg

SEQ ID NO: 9555 - RNA, 20 nt, synthetic construct
  source 1..20: mol_type = other RNA
tctggagctggggagtccca

SEQ ID NO: 9556 - RNA, 20 nt, synthetic construct
  source 1..20: mol_type = other RNA
ctggagctggggagtcccaa

SEQ ID NO: 9557 - RNA, 20 nt, synthetic construct
  source 1..20: mol_type = other RNA
caccttggggcctggccctt

SEQ ID NO: 9558 - RNA, 20 nt, synthetic construct
  source 1..20: mol_type = other RNA
gctggggagtcccaagggcc

SEQ ID NO: 9559 - RNA, 20 nt, synthetic construct
  source 1..20: mol_type = other RNA
tcaccttggggcctggccct

SEQ ID NO: 9560 - RNA, 20 nt, synthetic construct
  source 1..20: mol_type = other RNA
gagaaactcaccttggggcc

SEQ ID NO: 9561 - RNA, 20 nt, synthetic construct
  source 1..20: mol_type = other RNA
gtcccaagggccaggcccca

SEQ ID NO: 9562 - RNA, 20 nt, synthetic construct
  source 1..20: mol_type = other RNA
ggcaagagaaactcaccttg

SEQ ID NO: 9563 - RNA, 20 nt, synthetic construct
  source 1..20: mol_type = other RNA
tggcaagagaaactcacctt

SEQ ID NO: 9564 - RNA, 20 nt, synthetic construct
  source 1..20: mol_type = other RNA
ctggcaagagaaactcacct

SEQ ID NO: 9565 - RNA, 20 nt, synthetic construct
  source 1..20: mol_type = other RNA
gaacttgttgtactggacgc

SEQ ID NO: 9566 - RNA, 20 nt, synthetic construct
  source 1..20: mol_type = other RNA
cagccgtgaacttgttgtac

SEQ ID NO: 9567 - RNA, 20 nt, synthetic construct
  source 1..20: mol_type = other RNA
cgtccagtacaacaagttca

SEQ ID NO: 9568 - RNA, 20 nt, synthetic construct
  source 1..20: mol_type = other RNA
tacaacaagttcacggctgc

SEQ ID NO: 9569 - RNA, 20 nt, synthetic construct
  source 1..20: mol_type = other RNA
acaacaagttcacggctgcc

SEQ ID NO: 9570 - RNA, 20 nt, synthetic construct
  source 1..20: mol_type = other RNA
caacaagttcacggctgccg

SEQ ID NO: 9571 - RNA, 20 nt, synthetic construct
  source 1..20: mol_type = other RNA
ggcagcgagctgctgggccc

SEQ ID NO: 9572 - RNA, 20 nt, synthetic construct
  source 1..20: mol_type = other RNA
aaggctggcagcgagctgct

SEQ ID NO: 9573 - RNA, 20 nt, synthetic construct
  source 1..20: mol_type = other RNA
gaaggctggcagcgagctgc

SEQ ID NO: 9574 - RNA, 20 nt, synthetic construct
  source 1..20: mol_type = other RNA
agcagctcgctgccagcctt

SEQ ID NO: 9575 - RNA, 20 nt, synthetic construct
  source 1..20: mol_type = other RNA
atgaggacacctccgaaggc

SEQ ID NO: 9576 - RNA, 20 nt, synthetic construct
  source 1..20: mol_type = other RNA
agctcgctgccagccttcgg

SEQ ID NO: 9577 - RNA, 20 nt, synthetic construct
  source 1..20: mol_type = other RNA
ccacatgaggacacctccga

SEQ ID NO: 9578 - RNA, 20 nt, synthetic construct
  source 1..20: mol_type = other RNA
ccttcggaggtgtcctcatg

SEQ ID NO: 9579 - RNA, 20 nt, synthetic construct
  source 1..20: mol_type = other RNA
tacgccagcgtctccacatg

SEQ ID NO: 9580 - RNA, 20 nt, synthetic construct
  source 1..20: mol_type = other RNA
gtgtcctcatgtggagacgc

SEQ ID NO: 9581 - RNA, 20 nt, synthetic construct
  source 1..20: mol_type = other RNA
ggagacgctggcgtaagtcc

SEQ ID NO: 9582 - RNA, 20 nt, synthetic construct
  source 1..20: mol_type = other RNA
ctccacccaccagggttgcc

SEQ ID NO: 9583 - RNA, 20 nt, synthetic construct
  source 1..20: mol_type = other RNA
ggcgtaagtccaggcaaccc

SEQ ID NO: 9584 - RNA, 20 nt, synthetic construct
  source 1..20: mol_type = other RNA
gtaagtccaggcaaccctgg

SEQ ID NO: 9585 - RNA, 20 nt, synthetic construct
  source 1..20: mol_type = other RNA
taagtccaggcaaccctggt

SEQ ID NO: 9586 - RNA, 20 nt, synthetic construct
  source 1..20: mol_type = other RNA
gagttgttctccacccacca

SEQ ID NO: 9587 - RNA, 20 nt, synthetic construct
  source 1..20: mol_type = other RNA
gtccaggcaaccctggtggg

SEQ ID NO: 9588 - RNA, 20 nt, synthetic construct
  source 1..20: mol_type = other RNA
tgagttgttctccacccacc

SEQ ID NO: 9589 - RNA, 20 nt, synthetic construct
  source 1..20: mol_type = other RNA
tggagaacaactcactcccc

SEQ ID NO: 9590 - RNA, 20 nt, synthetic construct
  source 1..20: mol_type = other RNA
cacactgggccacacgcctg

SEQ ID NO: 9591 - RNA, 20 nt, synthetic construct
  source 1..20: mol_type = other RNA
tcacactgggccacacgcct

SEQ ID NO: 9592 - RNA, 20 nt, synthetic construct
  source 1..20: mol_type = other RNA
caactcactccccaggcgtg

SEQ ID NO: 9593 - RNA, 20 nt, synthetic construct
  source 1..20: mol_type = other RNA
gtcacactgggccacacgcc

SEQ ID NO: 9594 - RNA, 20 nt, synthetic construct
  source 1..20: mol_type = other RNA
ttgagctccggggtcacact

SEQ ID NO: 9595 - RNA, 20 nt, synthetic construct
  source 1..20: mol_type = other RNA
tttgagctccggggtcacac

SEQ ID NO: 9596 - RNA, 20 nt, synthetic construct
  source 1..20: mol_type = other RNA
cgtgtggcccagtgtgaccc

SEQ ID NO: 9597 - RNA, 20 nt, synthetic construct
  source 1..20: mol_type = other RNA
agagcatgatttgagctccg

SEQ ID NO: 9598 - RNA, 20 nt, synthetic construct
  source 1..20: mol_type = other RNA
aagagcatgatttgagctcc

SEQ ID NO: 9599 - RNA, 20 nt, synthetic construct
  source 1..20: mol_type = other RNA
gaagagcatgatttgagctc

SEQ ID NO: 9600 - RNA, 20 nt, synthetic construct
  source 1..20: mol_type = other RNA
cagggttgcagattggtgaa

SEQ ID NO: 9601 - RNA, 20 nt, synthetic construct
  source 1..20: mol_type = other RNA
ccagggttgcagattggtga

SEQ ID NO: 9602 - RNA, 20 nt, synthetic construct
  source 1..20: mol_type = other RNA
gctcacccagggttgcagat

SEQ ID NO: 9603 - RNA, 20 nt, synthetic construct
  source 1..20: mol_type = other RNA
ccttcaccaatctgcaaccc

SEQ ID NO: 9604 - RNA, 20 nt, synthetic construct
  source 1..20: mol_type = other RNA
cttcaccaatctgcaaccct

SEQ ID NO: 9605 - RNA, 20 nt, synthetic construct
  source 1..20: mol_type = other RNA
gggaagtgtctgctcaccca

SEQ ID NO: 9606 - RNA, 20 nt, synthetic construct
  source 1..20: mol_type = other RNA
ggggaagtgtctgctcaccc

SEQ ID NO: 9607 - RNA, 20 nt, synthetic construct
  source 1..20: mol_type = other RNA
tgagcagacacttccccctc

SEQ ID NO: 9608 - RNA, 20 nt, synthetic construct
  source 1..20: mol_type = other RNA
gaagaagctgaagccagagg

SEQ ID NO: 9609 - RNA, 20 nt, synthetic construct
  source 1..20: mol_type = other RNA
tgaagaagctgaagccagag

SEQ ID NO: 9610 - RNA, 20 nt, synthetic construct
  source 1..20: mol_type = other RNA
atgaagaagctgaagccaga

SEQ ID NO: 9611 - RNA, 20 nt, synthetic construct
  source 1..20: mol_type = other RNA
gatgaagaagctgaagccag

SEQ ID NO: 9612 - RNA, 20 nt, synthetic construct
  source 1..20: mol_type = other RNA
cagcttcttcatctgtaaag

SEQ ID NO: 9613 - RNA, 20 nt, synthetic construct
  source 1..20: mol_type = other RNA
agcttcttcatctgtaaagt

SEQ ID NO: 9614 - RNA, 20 nt, synthetic construct
  source 1..20: mol_type = other RNA
gcttcttcatctgtaaagtg

SEQ ID NO: 9615 - RNA, 20 nt, synthetic construct
  source 1..20: mol_type = other RNA
agtaataatatccacccaag

SEQ ID NO: 9616 - RNA, 20 nt, synthetic construct
  source 1..20: mol_type = other RNA
gcctcacaaaacctcttggg

SEQ ID NO: 9617 - RNA, 20 nt, synthetic construct
  source 1..20: mol_type = other RNA
taagcctcacaaaacctctt

SEQ ID NO: 9618 - RNA, 20 nt, synthetic construct
  source 1..20: mol_type = other RNA
ttaagcctcacaaaacctct

SEQ ID NO: 9619 - RNA, 20 nt, synthetic construct
  source 1..20: mol_type = other RNA
tccacccaagaggttttgtg

SEQ ID NO: 9620 - RNA, 20 nt, synthetic construct
  source 1..20: mol_type = other RNA
gttgttataagagctttgta

SEQ ID NO: 9621 - RNA, 20 nt, synthetic construct
  source 1..20: mol_type = other RNA
tgttgttataagagctttgt

SEQ ID NO: 9622 - RNA, 20 nt, synthetic construct
  source 1..20: mol_type = other RNA
gctcttataacaacagtagc

SEQ ID NO: 9623 - RNA, 20 nt, synthetic construct
  source 1..20: mol_type = other RNA
cagcctaatatagcatttat

SEQ ID NO: 9624 - RNA, 20 nt, synthetic construct
  source 1..20: mol_type = other RNA
atgccaataaatgctatatt

SEQ ID NO: 9625 - RNA, 20 nt, synthetic construct
  source 1..20: mol_type = other RNA
tggatgtcagcaatttcata

SEQ ID NO: 9626 - RNA, 20 nt, synthetic construct
  source 1..20: mol_type = other RNA
ttttacaggtcaaaaatggg

SEQ ID NO: 9627 - RNA, 20 nt, synthetic construct
  source 1..20: mol_type = other RNA
caattttacaggtcaaaaat

SEQ ID NO: 9628 - RNA, 20 nt, synthetic construct
  source 1..20: mol_type = other RNA
ccaattttacaggtcaaaaa

SEQ ID NO: 9629 - RNA, 20 nt, synthetic construct
  source 1..20: mol_type = other RNA
tatgaaattgccaattttac

SEQ ID NO: 9630 - RNA, 20 nt, synthetic construct
  source 1..20: mol_type = other RNA
ccatttttgacctgtaaaat

SEQ ID NO: 9631 - RNA, 20 nt, synthetic construct
  source 1..20: mol_type = other RNA
gtaaaattggcaatttcata

SEQ ID NO: 9632 - RNA, 20 nt, synthetic construct
  source 1..20: mol_type = other RNA
ttggcaatttcatatggttc

SEQ ID NO: 9633 - RNA, 20 nt, synthetic construct
  source 1..20: mol_type = other RNA
gtaaccagtattggacatca

SEQ ID NO: 9634 - RNA, 20 nt, synthetic construct
  source 1..20: mol_type = other RNA
gtcaccatgatgtccaatac

SEQ ID NO: 9635 - RNA, 20 nt, synthetic construct
  source 1..20: mol_type = other RNA
gaatataaagtaaccagtat

SEQ ID NO: 9636 - RNA, 20 nt, synthetic construct
  source 1..20: mol_type = other RNA
ttagaagaggtgagtgattg

SEQ ID NO: 9637 - RNA, 20 nt, synthetic construct
  source 1..20: mol_type = other RNA
caccctgtgcgtcttagaag

SEQ ID NO: 9638 - RNA, 20 nt, synthetic construct
  source 1..20: mol_type = other RNA
tcacctcttctaagacgcac

SEQ ID NO: 9639 - RNA, 20 nt, synthetic construct
  source 1..20: mol_type = other RNA
cacctcttctaagacgcaca

SEQ ID NO: 9640 - RNA, 20 nt, synthetic construct
  source 1..20: mol_type = other RNA
ctcttctaagacgcacaggg

SEQ ID NO: 9641 - RNA, 20 nt, synthetic construct
  source 1..20: mol_type = other RNA
tcttctaagacgcacagggt

SEQ ID NO: 9642 - RNA, 20 nt, synthetic construct
  source 1..20: mol_type = other RNA
attttcctcatctgtaaaat

SEQ ID NO: 9643 - RNA, 20 nt, synthetic construct
  source 1..20: mol_type = other RNA
tattttcctcatctgtaaaa

SEQ ID NO: 9644 - RNA, 20 nt, synthetic construct
  source 1..20: mol_type = other RNA
caagacccattttacagatg

SEQ ID NO: 9645 - RNA, 20 nt, synthetic construct
  source 1..20: mol_type = other RNA
gagcagttaactaacctttc

SEQ ID NO: 9646 - RNA, 20 nt, synthetic construct
  source 1..20: mol_type = other RNA
agcagttaactaacctttct

SEQ ID NO: 9647 - RNA, 20 nt, synthetic construct
  source 1..20: mol_type = other RNA
gcagttaactaacctttctg

SEQ ID NO: 9648 - RNA, 20 nt, synthetic construct
  source 1..20: mol_type = other RNA
cttgctgtgtgaccccagaa

SEQ ID NO: 9649 - RNA, 20 nt, synthetic construct
  source 1..20: mol_type = other RNA
agtcagctgcagaaccataa

SEQ ID NO: 9650 - RNA, 20 nt, synthetic construct
  source 1..20: mol_type = other RNA
ggaggcccgagattccttta

SEQ ID NO: 9651 - RNA, 20 nt, synthetic construct
  source 1..20: mol_type = other RNA
gcagaaccataaaggaatct

SEQ ID NO: 9652 - RNA, 20 nt, synthetic construct
  source 1..20: mol_type = other RNA
cagaaccataaaggaatctc

SEQ ID NO: 9653 - RNA, 20 nt, synthetic construct
  source 1..20: mol_type = other RNA
aaaggaatctcgggcctcct

SEQ ID NO: 9654 - RNA, 20 nt, synthetic construct
  source 1..20: mol_type = other RNA
gggaaaaggagaagcctagg

SEQ ID NO: 9655 - RNA, 20 nt, synthetic construct
  source 1..20: mol_type = other RNA
atggggaaaaggagaagcct

SEQ ID NO: 9656 - RNA, 20 nt, synthetic construct
  source 1..20: mol_type = other RNA
cggtgtgggtcatggggaaa

SEQ ID NO: 9657 - RNA, 20 nt, synthetic construct
  source 1..20: mol_type = other RNA
accgaccggtgtgggtcatg

SEQ ID NO: 9658 - RNA, 20 nt, synthetic construct
  source 1..20: mol_type = other RNA
taccgaccggtgtgggtcat

SEQ ID NO: 9659 - RNA, 20 nt, synthetic construct
  source 1..20: mol_type = other RNA
ataccgaccggtgtgggtca

SEQ ID NO: 9660 - RNA, 20 nt, synthetic construct
  source 1..20: mol_type = other RNA
cttttccccatgacccacac

SEQ ID NO: 9661 - RNA, 20 nt, synthetic construct
  source 1..20: mol_type = other RNA
ggcaagataccgaccggtgt

SEQ ID NO: 9662 - RNA, 20 nt, synthetic construct
  source 1..20: mol_type = other RNA
tggcaagataccgaccggtg

SEQ ID NO: 9663 - RNA, 20 nt, synthetic construct
  source 1..20: mol_type = other RNA
tccccatgacccacaccggt

SEQ ID NO: 9664 - RNA, 20 nt, synthetic construct
  source 1..20: mol_type = other RNA
tcccctggcaagataccgac

SEQ ID NO: 9665 - RNA, 20 nt, synthetic construct
  source 1..20: mol_type = other RNA
acaccggtcggtatcttgcc

SEQ ID NO: 9666 - RNA, 20 nt, synthetic construct
  source 1..20: mol_type = other RNA
caccggtcggtatcttgcca

SEQ ID NO: 9667 - RNA, 20 nt, synthetic construct
  source 1..20: mol_type = other RNA
accggtcggtatcttgccag

SEQ ID NO: 9668 - RNA, 20 nt, synthetic construct
  source 1..20: mol_type = other RNA
aacgttggggacttttcccc

SEQ ID NO: 9669 - RNA, 20 nt, synthetic construct
  source 1..20: mol_type = other RNA
ccacccagcctagaacgttg

SEQ ID NO: 9670 - RNA, 20 nt, synthetic construct
  source 1..20: mol_type = other RNA
tccacccagcctagaacgtt

SEQ ID NO: 9671 - RNA, 20 nt, synthetic construct
  source 1..20: mol_type = other RNA
ttccacccagcctagaacgt

SEQ ID NO: 9672 - RNA, 20 nt, synthetic construct
  source 1..20: mol_type = other RNA
ggaaaagtccccaacgttct

SEQ ID NO: 9673 - RNA, 20 nt, synthetic construct
  source 1..20: mol_type = other RNA
aagtccccaacgttctaggc

SEQ ID NO: 9674 - RNA, 20 nt, synthetic construct
  source 1..20: mol_type = other RNA
agtccccaacgttctaggct

SEQ ID NO: 9675 - RNA, 20 nt, synthetic construct
  source 1..20: mol_type = other RNA
ccccaacgttctaggctggg

SEQ ID NO: 9676 - RNA, 20 nt, synthetic construct
  source 1..20: mol_type = other RNA
aacgttctaggctgggtgga

SEQ ID NO: 9677 - RNA, 20 nt, synthetic construct
  source 1..20: mol_type = other RNA
gttctaggctgggtggaagg

SEQ ID NO: 9678 - RNA, 20 nt, synthetic construct
  source 1..20: mol_type = other RNA
ttctaggctgggtggaagga

SEQ ID NO: 9679 - RNA, 20 nt, synthetic construct
  source 1..20: mol_type = other RNA
gctgggtggaaggagggatt

SEQ ID NO: 9680 - RNA, 20 nt, synthetic construct
  source 1..20: mol_type = other RNA
ctgggtggaaggagggattt

SEQ ID NO: 9681 - RNA, 20 nt, synthetic construct
  source 1..20: mol_type = other RNA
tgggtggaaggagggatttg

SEQ ID NO: 9682 - RNA, 20 nt, synthetic construct
  source 1..20: mol_type = other RNA
gggtggaaggagggatttgg

SEQ ID NO: 9683 - RNA, 20 nt, synthetic construct
  source 1..20: mol_type = other RNA
gatttgggggcagctgtcac

SEQ ID NO: 9684 - RNA, 20 nt, synthetic construct
  source 1..20: mol_type = other RNA
atttgggggcagctgtcact

SEQ ID NO: 9685 - RNA, 20 nt, synthetic construct
  source 1..20: mol_type = other RNA
tttgggggcagctgtcactg

SEQ ID NO: 9686 - RNA, 20 nt, synthetic construct
  source 1..20: mol_type = other RNA
gcagctgtcactggggcccc

SEQ ID NO: 9687 - RNA, 20 nt, synthetic construct
  source 1..20: mol_type = other RNA
agaggagagagggcggcctg

SEQ ID NO: 9688 - RNA, 20 nt, synthetic construct
  source 1..20: mol_type = other RNA
tagaggagagagggcggcct

SEQ ID NO: 9689 - RNA, 20 nt, synthetic construct
  source 1..20: mol_type = other RNA
ttagaggagagagggcggcc

SEQ ID NO: 9690 - RNA, 20 nt, synthetic construct
  source 1..20: mol_type = other RNA
ccaggttagaggagagaggg

SEQ ID NO: 9691 - RNA, 20 nt, synthetic construct
  source 1..20: mol_type = other RNA
gagccaggttagaggagaga

SEQ ID NO: 9692 - RNA, 20 nt, synthetic construct
  source 1..20: mol_type = other RNA
agagccaggttagaggagag

SEQ ID NO: 9693 - RNA, 20 nt, synthetic construct
  source 1..20: mol_type = other RNA
ccgccctctctcctctaacc

SEQ ID NO: 9694 - RNA, 20 nt, synthetic construct
  source 1..20: mol_type = other RNA
gggactcagagccaggttag

SEQ ID NO: 9695 - RNA, 20 nt, synthetic construct
  source 1..20: mol_type = other RNA
gggggatgggactcagagcc

SEQ ID NO: 9696 - RNA, 20 nt, synthetic construct
  source 1..20: mol_type = other RNA
cacatcctgcaaggggggat

SEQ ID NO: 9697 - RNA, 20 nt, synthetic construct
  source 1..20: mol_type = other RNA
ccacatcctgcaagggggga

SEQ ID NO: 9698 - RNA, 20 nt, synthetic construct
  source 1..20: mol_type = other RNA
gcgtccacatcctgcaaggg

SEQ ID NO: 9699 - RNA, 20 nt, synthetic construct
  source 1..20: mol_type = other RNA
tgagtcccatccccccttgc

SEQ ID NO: 9700 - RNA, 20 nt, synthetic construct
  source 1..20: mol_type = other RNA
ggcgtccacatcctgcaagg

SEQ ID NO: 9701 - RNA, 20 nt, synthetic construct
  source 1..20: mol_type = other RNA
gggcgtccacatcctgcaag

SEQ ID NO: 9702 - RNA, 20 nt, synthetic construct
  source 1..20: mol_type = other RNA
tgggcgtccacatcctgcaa

SEQ ID NO: 9703 - RNA, 20 nt, synthetic construct
  source 1..20: mol_type = other RNA
gtgggcgtccacatcctgca

SEQ ID NO: 9704 - RNA, 20 nt, synthetic construct
  source 1..20: mol_type = other RNA
ccatccccccttgcaggatg

SEQ ID NO: 9705 - RNA, 20 nt, synthetic construct
  source 1..20: mol_type = other RNA
tggacactgaatgggatggt

SEQ ID NO: 9706 - RNA, 20 nt, synthetic construct
  source 1..20: mol_type = other RNA
ctggacactgaatgggatgg

SEQ ID NO: 9707 - RNA, 20 nt, synthetic construct
  source 1..20: mol_type = other RNA
ttcctggacactgaatggga

SEQ ID NO: 9708 - RNA, 20 nt, synthetic construct
  source 1..20: mol_type = other RNA
ggtgttcctggacactgaat

SEQ ID NO: 9709 - RNA, 20 nt, synthetic construct
  source 1..20: mol_type = other RNA
aggtgttcctggacactgaa

SEQ ID NO: 9710 - RNA, 20 nt, synthetic construct
  source 1..20: mol_type = other RNA
caccatcccattcagtgtcc

SEQ ID NO: 9711 - RNA, 20 nt, synthetic construct
  source 1..20: mol_type = other RNA
cctgttgttgcaggtgttcc

SEQ ID NO: 9712 - RNA, 20 nt, synthetic construct
  source 1..20: mol_type = other RNA
tccgtgaatcctgttgttgc

SEQ ID NO: 9713 - RNA, 20 nt, synthetic construct
  source 1..20: mol_type = other RNA
ccaggaacacctgcaacaac

SEQ ID NO: 9714 - RNA, 20 nt, synthetic construct
  source 1..20: mol_type = other RNA
acctgcaacaacaggattca

SEQ ID NO: 9715 - RNA, 20 nt, synthetic construct
  source 1..20: mol_type = other RNA
agcacagctgggatcatctc

SEQ ID NO: 9716 - RNA, 20 nt, synthetic construct
  source 1..20: mol_type = other RNA
accctgtccagagcacagct

SEQ ID NO: 9717 - RNA, 20 nt, synthetic construct
  source 1..20: mol_type = other RNA
taccctgtccagagcacagc

SEQ ID NO: 9718 - RNA, 20 nt, synthetic construct
  source 1..20: mol_type = other RNA
agatgatcccagctgtgctc

SEQ ID NO: 9719 - RNA, 20 nt, synthetic construct
  source 1..20: mol_type = other RNA
atcccagctgtgctctggac

SEQ ID NO: 9720 - RNA, 20 nt, synthetic construct
  source 1..20: mol_type = other RNA
tcccagctgtgctctggaca

SEQ ID NO: 9721 - RNA, 20 nt, synthetic construct
  source 1..20: mol_type = other RNA
gtgctctggacagggtaacc

SEQ ID NO: 9722 - RNA, 20 nt, synthetic construct
  source 1..20: mol_type = other RNA
tgctctggacagggtaacca

SEQ ID NO: 9723 - RNA, 20 nt, synthetic construct
  source 1..20: mol_type = other RNA
tctggacagggtaaccaggg

SEQ ID NO: 9724 - RNA, 20 nt, synthetic construct
  source 1..20: mol_type = other RNA
ctggacagggtaaccagggt

SEQ ID NO: 9725 - RNA, 20 nt, synthetic construct
  source 1..20: mol_type = other RNA
ctcccctcccaagcccaccc

SEQ ID NO: 9726 - RNA, 20 nt, synthetic construct
  source 1..20: mol_type = other RNA
cagggtaaccagggtgggct

SEQ ID NO: 9727 - RNA, 20 nt, synthetic construct
  source 1..20: mol_type = other RNA
agggtaaccagggtgggctt

SEQ ID NO: 9728 - RNA, 20 nt, synthetic construct
  source 1..20: mol_type = other RNA
gtaaccagggtgggcttggg

SEQ ID NO: 9729 - RNA, 20 nt, synthetic construct
  source 1..20: mol_type = other RNA
taaccagggtgggcttggga

SEQ ID NO: 9730 - RNA, 20 nt, synthetic construct
  source 1..20: mol_type = other RNA
aaccagggtgggcttgggag

SEQ ID NO: 9731 - RNA, 20 nt, synthetic construct
  source 1..20: mol_type = other RNA
ttgggaggggagagccgcag

SEQ ID NO: 9732 - RNA, 20 nt, synthetic construct
  source 1..20: mol_type = other RNA
tgggaggggagagccgcagt

SEQ ID NO: 9733 - RNA, 20 nt, synthetic construct
  source 1..20: mol_type = other RNA
acactgcccccaacccactg

SEQ ID NO: 9734 - RNA, 20 nt, synthetic construct
  source 1..20: mol_type = other RNA
aggggagagccgcagtgggt

SEQ ID NO: 9735 - RNA, 20 nt, synthetic construct
  source 1..20: mol_type = other RNA
ggggagagccgcagtgggtt

SEQ ID NO: 9736 - RNA, 20 nt, synthetic construct
  source 1..20: mol_type = other RNA
gggagagccgcagtgggttg

SEQ ID NO: 9737 - RNA, 20 nt, synthetic construct
  source 1..20: mol_type = other RNA
ggagagccgcagtgggttgg

SEQ ID NO: 9738 - RNA, 20 nt, synthetic construct
  source 1..20: mol_type = other RNA
tgggggcagtgtccttgtga

SEQ ID NO: 9739 - RNA, 20 nt, synthetic construct
  source 1..20: mol_type = other RNA
ttttgaatgccaccttcaca

SEQ ID NO: 9740 - RNA, 20 nt, synthetic construct
  source 1..20: mol_type = other RNA
gggcagtgtccttgtgaagg

SEQ ID NO: 9741 - RNA, 20 nt, synthetic construct
  source 1..20: mol_type = other RNA
aaggtggcattcaaaaaatg

SEQ ID NO: 9742 - RNA, 20 nt, synthetic construct
  source 1..20: mol_type = other RNA
aggtggcattcaaaaaatgt

SEQ ID NO: 9743 - RNA, 20 nt, synthetic construct
  source 1..20: mol_type = other RNA
tggcattcaaaaaatgtggg

SEQ ID NO: 9744 - RNA, 20 nt, synthetic construct
  source 1..20: mol_type = other RNA
ggcattcaaaaaatgtgggc

SEQ ID NO: 9745 - RNA, 20 nt, synthetic construct
  source 1..20: mol_type = other RNA
aaaaaatgtgggcgggacac

SEQ ID NO: 9746 - RNA, 20 nt, synthetic construct
  source 1..20: mol_type = other RNA
aaatgtgggcgggacacagg

SEQ ID NO: 9747 - RNA, 20 nt, synthetic construct
  source 1..20: mol_type = other RNA
aatgtgggcgggacacaggt

SEQ ID NO: 9748 - RNA, 20 nt, synthetic construct
  source 1..20: mol_type = other RNA
atgtgggcgggacacaggtg

SEQ ID NO: 9749 - RNA, 20 nt, synthetic construct
  source 1..20: mol_type = other RNA
ggcgggacacaggtggggct

SEQ ID NO: 9750 - RNA, 20 nt, synthetic construct
  source 1..20: mol_type = other RNA
acgcatgcgtccaagggtgg

SEQ ID NO: 9751 - RNA, 20 nt, synthetic construct
  source 1..20: mol_type = other RNA
tggggctaggccaccaccct

SEQ ID NO: 9752 - RNA, 20 nt, synthetic construct
  source 1..20: mol_type = other RNA
atgacgcatgcgtccaaggg

SEQ ID NO: 9753 - RNA, 20 nt, synthetic construct
  source 1..20: mol_type = other RNA
ctgatgacgcatgcgtccaa

SEQ ID NO: 9754 - RNA, 20 nt, synthetic construct
  source 1..20: mol_type = other RNA
tctgatgacgcatgcgtcca

SEQ ID NO: 9755 - RNA, 20 nt, synthetic construct
  source 1..20: mol_type = other RNA
gagcccagggtggagatgag

SEQ ID NO: 9756 - RNA, 20 nt, synthetic construct
  source 1..20: mol_type = other RNA
cgagcccagggtggagatga

SEQ ID NO: 9757 - RNA, 20 nt, synthetic construct
  source 1..20: mol_type = other RNA
ccgagcccagggtggagatg

SEQ ID NO: 9758 - RNA, 20 nt, synthetic construct
  source 1..20: mol_type = other RNA
acatcccctcatctccaccc

SEQ ID NO: 9759 - RNA, 20 nt, synthetic construct
  source 1..20: mol_type = other RNA
catcccctcatctccaccct

SEQ ID NO: 9760 - RNA, 20 nt, synthetic construct
  source 1..20: mol_type = other RNA
cagctccaccgagcccaggg

SEQ ID NO: 9761 - RNA, 20 nt, synthetic construct
  source 1..20: mol_type = other RNA
cctcatctccaccctgggct

SEQ ID NO: 9762 - RNA, 20 nt, synthetic construct
  source 1..20: mol_type = other RNA
ggacagctccaccgagccca

SEQ ID NO: 9763 - RNA, 20 nt, synthetic construct
  source 1..20: mol_type = other RNA
aggacagctccaccgagccc

SEQ ID NO: 9764 - RNA, 20 nt, synthetic construct
  source 1..20: mol_type = other RNA
catctccaccctgggctcgg

SEQ ID NO: 9765 - RNA, 20 nt, synthetic construct
  source 1..20: mol_type = other RNA
gctcggtggagctgtcctcc

SEQ ID NO: 9766 - RNA, 20 nt, synthetic construct
  source 1..20: mol_type = other RNA
accaagctcgcaaagcctgg

SEQ ID NO: 9767 - RNA, 20 nt, synthetic construct
  source 1..20: mol_type = other RNA
gggaccaagctcgcaaagcc

SEQ ID NO: 9768 - RNA, 20 nt, synthetic construct
  source 1..20: mol_type = other RNA
tcctccaggctttgcgagct

SEQ ID NO: 9769 - RNA, 20 nt, synthetic construct
  source 1..20: mol_type = other RNA
ctttgcgagcttggtccctg

SEQ ID NO: 9770 - RNA, 20 nt, synthetic construct
  source 1..20: mol_type = other RNA
gatctctaagcctgaccaca

SEQ ID NO: 9771 - RNA, 20 nt, synthetic construct
  source 1..20: mol_type = other RNA
cgagcttggtccctgtggtc

SEQ ID NO: 9772 - RNA, 20 nt, synthetic construct
  source 1..20: mol_type = other RNA
tgatctctaagcctgaccac

SEQ ID NO: 9773 - RNA, 20 nt, synthetic construct
  source 1..20: mol_type = other RNA
tgtggtcaggcttagagatc

SEQ ID NO: 9774 - RNA, 20 nt, synthetic construct
  source 1..20: mol_type = other RNA
gtggtcaggcttagagatca

SEQ ID NO: 9775 - RNA, 20 nt, synthetic construct
  source 1..20: mol_type = other RNA
tggtcaggcttagagatcag

SEQ ID NO: 9776 - RNA, 20 nt, synthetic construct
  source 1..20: mol_type = other RNA
aggcttagagatcaggggac

SEQ ID NO: 9777 - RNA, 20 nt, synthetic construct
  source 1..20: mol_type = other RNA
agatcaggggacaggaaagt

SEQ ID NO: 9778 - RNA, 20 nt, synthetic construct
  source 1..20: mol_type = other RNA
ctgaggctgtgggatgtgga

SEQ ID NO: 9779 - RNA, 20 nt, synthetic construct
  source 1..20: mol_type = other RNA
agcactgaggctgtgggatg

SEQ ID NO: 9780 - RNA, 20 nt, synthetic construct
  source 1..20: mol_type = other RNA
cttccaagcactgaggctgt

SEQ ID NO: 9781 - RNA, 20 nt, synthetic construct
  source 1..20: mol_type = other RNA
tcttccaagcactgaggctg

SEQ ID NO: 9782 - RNA, 20 nt, synthetic construct
  source 1..20: mol_type = other RNA
ggaagctcttccaagcactg

SEQ ID NO: 9783 - RNA, 20 nt, synthetic construct
  source 1..20: mol_type = other RNA
catcccacagcctcagtgct

SEQ ID NO: 9784 - RNA, 20 nt, synthetic construct
  source 1..20: mol_type = other RNA
gtgcttggaagagcttcctt

SEQ ID NO: 9785 - RNA, 20 nt, synthetic construct
  source 1..20: mol_type = other RNA
tgcttggaagagcttccttt

SEQ ID NO: 9786 - RNA, 20 nt, synthetic construct
  source 1..20: mol_type = other RNA
gcttggaagagcttcctttg

SEQ ID NO: 9787 - RNA, 20 nt, synthetic construct
  source 1..20: mol_type = other RNA
ggaaggcttggagtccccaa

SEQ ID NO: 9788 - RNA, 20 nt, synthetic construct
  source 1..20: mol_type = other RNA
aaacagcagctgggaaggct

SEQ ID NO: 9789 - RNA, 20 nt, synthetic construct
  source 1..20: mol_type = other RNA
agccgaaacagcagctggga

SEQ ID NO: 9790 - RNA, 20 nt, synthetic construct
  source 1..20: mol_type = other RNA
accaagccgaaacagcagct

SEQ ID NO: 9791 - RNA, 20 nt, synthetic construct
  source 1..20: mol_type = other RNA
caccaagccgaaacagcagc

SEQ ID NO: 9792 - RNA, 20 nt, synthetic construct
  source 1..20: mol_type = other RNA
agccttcccagctgctgttt

SEQ ID NO: 9793 - RNA, 20 nt, synthetic construct
  source 1..20: mol_type = other RNA
tcccagctgctgtttcggct

SEQ ID NO: 9794 - RNA, 20 nt, synthetic construct
  source 1..20: mol_type = other RNA
cagctgctgtttcggcttgg

SEQ ID NO: 9795 - RNA, 20 nt, synthetic construct
  source 1..20: mol_type = other RNA
gagacaaacccggagcatca

SEQ ID NO: 9796 - RNA, 20 nt, synthetic construct
  source 1..20: mol_type = other RNA
tgagacaaacccggagcatc

SEQ ID NO: 9797 - RNA, 20 nt, synthetic construct
  source 1..20: mol_type = other RNA
tggtggctgccctgatgctc

SEQ ID NO: 9798 - RNA, 20 nt, synthetic construct
  source 1..20: mol_type = other RNA
ggtggctgccctgatgctcc

SEQ ID NO: 9799 - RNA, 20 nt, synthetic construct
  source 1..20: mol_type = other RNA
aagttcatctgagacaaacc

SEQ ID NO: 9800 - RNA, 20 nt, synthetic construct
  source 1..20: mol_type = other RNA
tgatcttcatagtgaggagc

SEQ ID NO: 9801 - RNA, 20 nt, synthetic construct
  source 1..20: mol_type = other RNA
ggacagtgatcttcatagtg

SEQ ID NO: 9802 - RNA, 20 nt, synthetic construct
  source 1..20: mol_type = other RNA
tgcggggagcacagggctgg

SEQ ID NO: 9803 - RNA, 20 nt, synthetic construct
  source 1..20: mol_type = other RNA
gtgcggggagcacagggctg

SEQ ID NO: 9804 - RNA, 20 nt, synthetic construct
  source 1..20: mol_type = other RNA
agtgcggggagcacagggct

SEQ ID NO: 9805 - RNA, 20 nt, synthetic construct
  source 1..20: mol_type = other RNA
cagtgcggggagcacagggc

SEQ ID NO: 9806 - RNA, 20 nt, synthetic construct
  source 1..20: mol_type = other RNA
agcacagtgcggggagcaca

SEQ ID NO: 9807 - RNA, 20 nt, synthetic construct
  source 1..20: mol_type = other RNA
cagcacagtgcggggagcac

SEQ ID NO: 9808 - RNA, 20 nt, synthetic construct
  source 1..20: mol_type = other RNA
tggacgtgcagcacagtgcg

SEQ ID NO: 9809 - RNA, 20 nt, synthetic construct
  source 1..20: mol_type = other RNA
gtggacgtgcagcacagtgc

SEQ ID NO: 9810 - RNA, 20 nt, synthetic construct
  source 1..20: mol_type = other RNA
ggtggacgtgcagcacagtg

SEQ ID NO: 9811 - RNA, 20 nt, synthetic construct
  source 1..20: mol_type = other RNA
gaggggcagtggaatggagg

SEQ ID NO: 9812 - RNA, 20 nt, synthetic construct
  source 1..20: mol_type = other RNA
tgggaggggcagtggaatgg

SEQ ID NO: 9813 - RNA, 20 nt, synthetic construct
  source 1..20: mol_type = other RNA
ggatgggaggggcagtggaa

SEQ ID NO: 9814 - RNA, 20 nt, synthetic construct
  source 1..20: mol_type = other RNA
tggggggatgggaggggcag

SEQ ID NO: 9815 - RNA, 20 nt, synthetic construct
  source 1..20: mol_type = other RNA
tcaagatggggggatgggag

SEQ ID NO: 9816 - RNA, 20 nt, synthetic construct
  source 1..20: mol_type = other RNA
atcaagatggggggatggga

SEQ ID NO: 9817 - RNA, 20 nt, synthetic construct
  source 1..20: mol_type = other RNA
tatcaagatggggggatggg

SEQ ID NO: 9818 - RNA, 20 nt, synthetic construct
  source 1..20: mol_type = other RNA
tgctatcaagatggggggat

SEQ ID NO: 9819 - RNA, 20 nt, synthetic construct
  source 1..20: mol_type = other RNA
gtgctatcaagatgggggga

SEQ ID NO: 9820 - RNA, 20 nt, synthetic construct
  source 1..20: mol_type = other RNA
aagggtgctatcaagatggg

SEQ ID NO: 9821 - RNA, 20 nt, synthetic construct
  source 1..20: mol_type = other RNA
gaagggtgctatcaagatgg

SEQ ID NO: 9822 - RNA, 20 nt, synthetic construct
  source 1..20: mol_type = other RNA
ggaagggtgctatcaagatg

SEQ ID NO: 9823 - RNA, 20 nt, synthetic construct
  source 1..20: mol_type = other RNA
gggaagggtgctatcaagat

SEQ ID NO: 9824 - RNA, 20 nt, synthetic construct
  source 1..20: mol_type = other RNA
tgggaagggtgctatcaaga

SEQ ID NO: 9825 - RNA, 20 nt, synthetic construct
  source 1..20: mol_type = other RNA
atcttgatagcacccttccc

SEQ ID NO: 9826 - RNA, 20 nt, synthetic construct
  source 1..20: mol_type = other RNA
ggcagcttgacacctgggaa

SEQ ID NO: 9827 - RNA, 20 nt, synthetic construct
  source 1..20: mol_type = other RNA
gggcagcttgacacctggga

SEQ ID NO: 9828 - RNA, 20 nt, synthetic construct
  source 1..20: mol_type = other RNA
ggaggggcagcttgacacct

SEQ ID NO: 9829 - RNA, 20 nt, synthetic construct
  source 1..20: mol_type = other RNA
aggaggggcagcttgacacc

SEQ ID NO: 9830 - RNA, 20 nt, synthetic construct
  source 1..20: mol_type = other RNA
taggcaggacactctaggag

SEQ ID NO: 9831 - RNA, 20 nt, synthetic construct
  source 1..20: mol_type = other RNA
ttaggcaggacactctagga

SEQ ID NO: 9832 - RNA, 20 nt, synthetic construct
  source 1..20: mol_type = other RNA
tttaggcaggacactctagg

SEQ ID NO: 9833 - RNA, 20 nt, synthetic construct
  source 1..20: mol_type = other RNA
gggtttaggcaggacactct

SEQ ID NO: 9834 - RNA, 20 nt, synthetic construct
  source 1..20: mol_type = other RNA
ccaggagagggggtttaggc

SEQ ID NO: 9835 - RNA, 20 nt, synthetic construct
  source 1..20: mol_type = other RNA
ggagccaggagagggggttt

SEQ ID NO: 9836 - RNA, 20 nt, synthetic construct
  source 1..20: mol_type = other RNA
gcgggaggagccaggagagg

SEQ ID NO: 9837 - RNA, 20 nt, synthetic construct
  source 1..20: mol_type = other RNA
cctgcctaaaccccctctcc

SEQ ID NO: 9838 - RNA, 20 nt, synthetic construct
  source 1..20: mol_type = other RNA
agcgggaggagccaggagag

SEQ ID NO: 9839 - RNA, 20 nt, synthetic construct
  source 1..20: mol_type = other RNA
tagcgggaggagccaggaga

SEQ ID NO: 9840 - RNA, 20 nt, synthetic construct
  source 1..20: mol_type = other RNA
gtagcgggaggagccaggag

SEQ ID NO: 9841 - RNA, 20 nt, synthetic construct
  source 1..20: mol_type = other RNA
atgctgtagcgggaggagcc

SEQ ID NO: 9842 - RNA, 20 nt, synthetic construct
  source 1..20: mol_type = other RNA
agagaacatgctgtagcggg

SEQ ID NO: 9843 - RNA, 20 nt, synthetic construct
  source 1..20: mol_type = other RNA
ctcagagaacatgctgtagc

SEQ ID NO: 9844 - RNA, 20 nt, synthetic construct
  source 1..20: mol_type = other RNA
cctcagagaacatgctgtag

SEQ ID NO: 9845 - RNA, 20 nt, synthetic construct
  source 1..20: mol_type = other RNA
ccgctacagcatgttctctg

SEQ ID NO: 9846 - RNA, 20 nt, synthetic construct
  source 1..20: mol_type = other RNA
tctgaggacactaaccacgc

SEQ ID NO: 9847 - RNA, 20 nt, synthetic construct
  source 1..20: mol_type = other RNA
acccagttcaaggtccagcg

SEQ ID NO: 9848 - RNA, 20 nt, synthetic construct
  source 1..20: mol_type = other RNA
aaccacgctggaccttgaac

SEQ ID NO: 9849 - RNA, 20 nt, synthetic construct
  source 1..20: mol_type = other RNA
accacgctggaccttgaact

SEQ ID NO: 9850 - RNA, 20 nt, synthetic construct
  source 1..20: mol_type = other RNA
gtccacaagtacccagttca

SEQ ID NO: 9851 - RNA, 20 nt, synthetic construct
  source 1..20: mol_type = other RNA
gaccttgaactgggtacttg

SEQ ID NO: 9852 - RNA, 20 nt, synthetic construct
  source 1..20: mol_type = other RNA
tgtggacacagctcttctcc

SEQ ID NO: 9853 - RNA, 20 nt, synthetic construct
  source 1..20: mol_type = other RNA
gaggctcatgggatacagcc

SEQ ID NO: 9854 - RNA, 20 nt, synthetic construct
  source 1..20: mol_type = other RNA
gccaggatgctgaggctcat

SEQ ID NO: 9855 - RNA, 20 nt, synthetic construct
  source 1..20: mol_type = other RNA
tgccaggatgctgaggctca

SEQ ID NO: 9856 - RNA, 20 nt, synthetic construct
  source 1..20: mol_type = other RNA
ggccgggtgccaggatgctg

SEQ ID NO: 9857 - RNA, 20 nt, synthetic construct
  source 1..20: mol_type = other RNA
tcccatgagcctcagcatcc

SEQ ID NO: 9858 - RNA, 20 nt, synthetic construct
  source 1..20: mol_type = other RNA
agcctcagcatcctggcacc

SEQ ID NO: 9859 - RNA, 20 nt, synthetic construct
  source 1..20: mol_type = other RNA
accagcaggggccgggtgcc

SEQ ID NO: 9860 - RNA, 20 nt, synthetic construct
  source 1..20: mol_type = other RNA
accctgaaccagcaggggcc

SEQ ID NO: 9861 - RNA, 20 nt, synthetic construct
  source 1..20: mol_type = other RNA
aaccctgaaccagcaggggc

SEQ ID NO: 9862 - RNA, 20 nt, synthetic construct
  source 1..20: mol_type = other RNA
tcctggcacccggcccctgc

SEQ ID NO: 9863 - RNA, 20 nt, synthetic construct
  source 1..20: mol_type = other RNA
ggccaaccctgaaccagcag

SEQ ID NO: 9864 - RNA, 20 nt, synthetic construct
  source 1..20: mol_type = other RNA
gggccaaccctgaaccagca

SEQ ID NO: 9865 - RNA, 20 nt, synthetic construct
  source 1..20: mol_type = other RNA
ggggccaaccctgaaccagc

SEQ ID NO: 9866 - RNA, 20 nt, synthetic construct
  source 1..20: mol_type = other RNA
cacccggcccctgctggttc

SEQ ID NO: 9867 - RNA, 20 nt, synthetic construct
  source 1..20: mol_type = other RNA
acccggcccctgctggttca

SEQ ID NO: 9868 - RNA, 20 nt, synthetic construct
  source 1..20: mol_type = other RNA
ggcccctgctggttcagggt

SEQ ID NO: 9869 - RNA, 20 nt, synthetic construct
  source 1..20: mol_type = other RNA
gttcagggttggcccctgcc

SEQ ID NO: 9870 - RNA, 20 nt, synthetic construct
  source 1..20: mol_type = other RNA
ttcattccgcagccgggcag

SEQ ID NO: 9871 - RNA, 20 nt, synthetic construct
  source 1..20: mol_type = other RNA
gttcattccgcagccgggca

SEQ ID NO: 9872 - RNA, 20 nt, synthetic construct
  source 1..20: mol_type = other RNA
ggttcattccgcagccgggc

SEQ ID NO: 9873 - RNA, 20 nt, synthetic construct
  source 1..20: mol_type = other RNA
ggttggcccctgcccggctg

SEQ ID NO: 9874 - RNA, 20 nt, synthetic construct
  source 1..20: mol_type = other RNA
atgtggttcattccgcagcc

SEQ ID NO: 9875 - RNA, 20 nt, synthetic construct
  source 1..20: mol_type = other RNA
gatgtggttcattccgcagc

SEQ ID NO: 9876 - RNA, 20 nt, synthetic construct
  source 1..20: mol_type = other RNA
tctgtcagcagagcaagatg

SEQ ID NO: 9877 - RNA, 20 nt, synthetic construct
  source 1..20: mol_type = other RNA
cttgctctgctgacagacac

SEQ ID NO: 9878 - RNA, 20 nt, synthetic construct
  source 1..20: mol_type = other RNA
tctgctgacagacacaggcc

SEQ ID NO: 9879 - RNA, 20 nt, synthetic construct
  source 1..20: mol_type = other RNA
acagacacaggcccggctcc

SEQ ID NO: 9880 - RNA, 20 nt, synthetic construct
  source 1..20: mol_type = other RNA
cgctaaaggagcctggagcc

SEQ ID NO: 9881 - RNA, 20 nt, synthetic construct
  source 1..20: mol_type = other RNA
gcgctaaaggagcctggagc

SEQ ID NO: 9882 - RNA, 20 nt, synthetic construct
  source 1..20: mol_type = other RNA
aactgggcgctaaaggagcc

SEQ ID NO: 9883 - RNA, 20 nt, synthetic construct
  source 1..20: mol_type = other RNA
tccacccaactgggcgctaa

SEQ ID NO: 9884 - RNA, 20 nt, synthetic construct
  source 1..20: mol_type = other RNA
aggctcctttagcgcccagt

SEQ ID NO: 9885 - RNA, 20 nt, synthetic construct
  source 1..20: mol_type = other RNA
ggctcctttagcgcccagtt

SEQ ID NO: 9886 - RNA, 20 nt, synthetic construct
  source 1..20: mol_type = other RNA
caccaggcatccacccaact

SEQ ID NO: 9887 - RNA, 20 nt, synthetic construct
  source 1..20: mol_type = other RNA
tcctttagcgcccagttggg

SEQ ID NO: 9888 - RNA, 20 nt, synthetic construct
  source 1..20: mol_type = other RNA
ccaccaggcatccacccaac

SEQ ID NO: 9889 - RNA, 20 nt, synthetic construct
  source 1..20: mol_type = other RNA
cgcccagttgggtggatgcc

SEQ ID NO: 9890 - RNA, 20 nt, synthetic construct
  source 1..20: mol_type = other RNA
ccagttgggtggatgcctgg

SEQ ID NO: 9891 - RNA, 20 nt, synthetic construct
  source 1..20: mol_type = other RNA
ggtggaccgcagctgccacc

SEQ ID NO: 9892 - RNA, 20 nt, synthetic construct
  source 1..20: mol_type = other RNA
tggatgcctggtggcagctg

SEQ ID NO: 9893 - RNA, 20 nt, synthetic construct
  source 1..20: mol_type = other RNA
gtggcagctgcggtccaccc

SEQ ID NO: 9894 - RNA, 20 nt, synthetic construct
  source 1..20: mol_type = other RNA
aaggcctcggggctcctggg

SEQ ID NO: 9895 - RNA, 20 nt, synthetic construct
  source 1..20: mol_type = other RNA
gagaaggcctcggggctcct

SEQ ID NO: 9896 - RNA, 20 nt, synthetic construct
  source 1..20: mol_type = other RNA
agagaaggcctcggggctcc

SEQ ID NO: 9897 - RNA, 20 nt, synthetic construct
  source 1..20: mol_type = other RNA
cggtccacccaggagccccg

SEQ ID NO: 9898 - RNA, 20 nt, synthetic construct
  source 1..20: mol_type = other RNA
gtccttcagagaaggcctcg

SEQ ID NO: 9899 - RNA, 20 nt, synthetic construct
  source 1..20: mol_type = other RNA
tgtccttcagagaaggcctc

SEQ ID NO: 9900 - RNA, 20 nt, synthetic construct
  source 1..20: mol_type = other RNA
atgtccttcagagaaggcct

SEQ ID NO: 9901 - RNA, 20 nt, synthetic construct
  source 1..20: mol_type = other RNA
tccgcaatgtccttcagaga

SEQ ID NO: 9902 - RNA, 20 nt, synthetic construct
  source 1..20: mol_type = other RNA
agccccgaggccttctctga

SEQ ID NO: 9903 - RNA, 20 nt, synthetic construct
  source 1..20: mol_type = other RNA
gccttctctgaaggacattg

SEQ ID NO: 9904 - RNA, 20 nt, synthetic construct
  source 1..20: mol_type = other RNA
aaggacattgcggacagcca

SEQ ID NO: 9905 - RNA, 20 nt, synthetic construct
  source 1..20: mol_type = other RNA
cattgcggacagccacggcc

SEQ ID NO: 9906 - RNA, 20 nt, synthetic construct
  source 1..20: mol_type = other RNA
cactccctctggcctggccg

SEQ ID NO: 9907 - RNA, 20 nt, synthetic construct
  source 1..20: mol_type = other RNA
gacagccacggccaggccag

SEQ ID NO: 9908 - RNA, 20 nt, synthetic construct
  source 1..20: mol_type = other RNA
ctctgtcactccctctggcc

SEQ ID NO: 9909 - RNA, 20 nt, synthetic construct
  source 1..20: mol_type = other RNA
acagccacggccaggccaga

SEQ ID NO: 9910 - RNA, 20 nt, synthetic construct
  source 1..20: mol_type = other RNA
gctgcctctgtcactccctc

SEQ ID NO: 9911 - RNA, 20 nt, synthetic construct
  source 1..20: mol_type = other RNA
caggccagagggagtgacag

SEQ ID NO: 9912 - RNA, 20 nt, synthetic construct
  source 1..20: mol_type = other RNA
gggcctgggcaggcagaatg

SEQ ID NO: 9913 - RNA, 20 nt, synthetic construct
  source 1..20: mol_type = other RNA
ggggcctgggcaggcagaat

SEQ ID NO: 9914 - RNA, 20 nt, synthetic construct
  source 1..20: mol_type = other RNA
aggggcctgggcaggcagaa

SEQ ID NO: 9915 - RNA, 20 nt, synthetic construct
  source 1..20: mol_type = other RNA
cagccccattctgcctgccc

SEQ ID NO: 9916 - RNA, 20 nt, synthetic construct
  source 1..20: mol_type = other RNA
agggtggcaggggcctgggc

SEQ ID NO: 9917 - RNA, 20 nt, synthetic construct
  source 1..20: mol_type = other RNA
ccccagggtggcaggggcct

SEQ ID NO: 9918 - RNA, 20 nt, synthetic construct
  source 1..20: mol_type = other RNA
tccccagggtggcaggggcc

SEQ ID NO: 9919 - RNA, 20 nt, synthetic construct
  source 1..20: mol_type = other RNA
ctttctccccagggtggcag

SEQ ID NO: 9920 - RNA, 20 nt, synthetic construct
  source 1..20: mol_type = other RNA
actttctccccagggtggca

SEQ ID NO: 9921 - RNA, 20 nt, synthetic construct
  source 1..20: mol_type = other RNA
tactttctccccagggtggc

SEQ ID NO: 9922 - RNA, 20 nt, synthetic construct
  source 1..20: mol_type = other RNA
tgcccaggcccctgccaccc

SEQ ID NO: 9923 - RNA, 20 nt, synthetic construct
  source 1..20: mol_type = other RNA
gcccaggcccctgccaccct

SEQ ID NO: 9924 - RNA, 20 nt, synthetic construct
  source 1..20: mol_type = other RNA
cccaggcccctgccaccctg

SEQ ID NO: 9925 - RNA, 20 nt, synthetic construct
  source 1..20: mol_type = other RNA
gaagtactttctccccaggg

SEQ ID NO: 9926 - RNA, 20 nt, synthetic construct
  source 1..20: mol_type = other RNA
aaagaagtactttctcccca

SEQ ID NO: 9927 - RNA, 20 nt, synthetic construct
  source 1..20: mol_type = other RNA
aaaagaagtactttctcccc

SEQ ID NO: 9928 - RNA, 20 nt, synthetic construct
  source 1..20: mol_type = other RNA
acagagtctcactgttgccc

SEQ ID NO: 9929 - RNA, 20 nt, synthetic construct
  source 1..20: mol_type = other RNA
agtctcactgttgcccaggc

SEQ ID NO: 9930 - RNA, 20 nt, synthetic construct
  source 1..20: mol_type = other RNA
gcaccactgcacgccagcct

SEQ ID NO: 9931 - RNA, 20 nt, synthetic construct
  source 1..20: mol_type = other RNA
cgcaccactgcacgccagcc

SEQ ID NO: 9932 - RNA, 20 nt, synthetic construct
  source 1..20: mol_type = other RNA
ttgcccaggctggcgtgcag

SEQ ID NO: 9933 - RNA, 20 nt, synthetic construct
  source 1..20: mol_type = other RNA
tggcgtgcagtggtgcgatc

SEQ ID NO: 9934 - RNA, 20 nt, synthetic construct
  source 1..20: mol_type = other RNA
ggcgtgcagtggtgcgatct

SEQ ID NO: 9935 - RNA, 20 nt, synthetic construct
  source 1..20: mol_type = other RNA
cgcttgaacccaagaggcgg

SEQ ID NO: 9936 - RNA, 20 nt, synthetic construct
  source 1..20: mol_type = other RNA
tcactgcaacctccgcctct

SEQ ID NO: 9937 - RNA, 20 nt, synthetic construct
  source 1..20: mol_type = other RNA
cactgcaacctccgcctctt

SEQ ID NO: 9938 - RNA, 20 nt, synthetic construct
  source 1..20: mol_type = other RNA
aatcgcttgaacccaagagg

SEQ ID NO: 9939 - RNA, 20 nt, synthetic construct
  source 1..20: mol_type = other RNA
aagaatcgcttgaacccaag

SEQ ID NO: 9940 - RNA, 20 nt, synthetic construct
  source 1..20: mol_type = other RNA
tgtagtcccagctactcggg

SEQ ID NO: 9941 - RNA, 20 nt, synthetic construct
  source 1..20: mol_type = other RNA
gcctgtagtcccagctactc

SEQ ID NO: 9942 - RNA, 20 nt, synthetic construct
  source 1..20: mol_type = other RNA
gcttcagcctcccgagtagc

SEQ ID NO: 9943 - RNA, 20 nt, synthetic construct
  source 1..20: mol_type = other RNA
tgcctgtagtcccagctact

SEQ ID NO: 9944 - RNA, 20 nt, synthetic construct
  source 1..20: mol_type = other RNA
cttcagcctcccgagtagct

SEQ ID NO: 9945 - RNA, 20 nt, synthetic construct
  source 1..20: mol_type = other RNA
tcccgagtagctgggactac

SEQ ID NO: 9946 - RNA, 20 nt, synthetic construct
  source 1..20: mol_type = other RNA
aattagccagacatgatggt

SEQ ID NO: 9947 - RNA, 20 nt, synthetic construct
  source 1..20: mol_type = other RNA
aaattagccagacatgatgg

SEQ ID NO: 9948 - RNA, 20 nt, synthetic construct
  source 1..20: mol_type = other RNA
gaaaaattagccagacatga

SEQ ID NO: 9949 - RNA, 20 nt, synthetic construct
  source 1..20: mol_type = other RNA
caggcacccaccatcatgtc

SEQ ID NO: 9950 - RNA, 20 nt, synthetic construct
  source 1..20: mol_type = other RNA
ttttcatttttagtagagac

SEQ ID NO: 9951 - RNA, 20 nt, synthetic construct
  source 1..20: mol_type = other RNA
tttcatttttagtagagaca

SEQ ID NO: 9952 - RNA, 20 nt, synthetic construct
  source 1..20: mol_type = other RNA
gagacagggttttgccatgt

SEQ ID NO: 9953 - RNA, 20 nt, synthetic construct
  source 1..20: mol_type = other RNA
tgagaccagcctggccaaca

SEQ ID NO: 9954 - RNA, 20 nt, synthetic construct
  source 1..20: mol_type = other RNA
agggttttgccatgttggcc

SEQ ID NO: 9955 - RNA, 20 nt, synthetic construct
  source 1..20: mol_type = other RNA
ttttgccatgttggccaggc

SEQ ID NO: 9956 - RNA, 20 nt, synthetic construct
  source 1..20: mol_type = other RNA
tcaagagtttgagaccagcc

SEQ ID NO: 9957 - RNA, 20 nt, synthetic construct
  source 1..20: mol_type = other RNA
ggtctcaaactcttgacctc

SEQ ID NO: 9958 - RNA, 20 nt, synthetic construct
  source 1..20: mol_type = other RNA
tgaggtgggtggatcacctg

SEQ ID NO: 9959 - RNA, 20 nt, synthetic construct
  source 1..20: mol_type = other RNA
ctttgggaggctgaggtggg

SEQ ID NO: 9960 - RNA, 20 nt, synthetic construct
  source 1..20: mol_type = other RNA
gcactttgggaggctgaggt

SEQ ID NO: 9961 - RNA, 20 nt, synthetic construct
  source 1..20: mol_type = other RNA
agcactttgggaggctgagg

SEQ ID NO: 9962 - RNA, 20 nt, synthetic construct
  source 1..20: mol_type = other RNA
cccagcactttgggaggctg

SEQ ID NO: 9963 - RNA, 20 nt, synthetic construct
  source 1..20: mol_type = other RNA
tgtaatcccagcactttggg

SEQ ID NO: 9964 - RNA, 20 nt, synthetic construct
  source 1..20: mol_type = other RNA
gcttgtaatcccagcacttt

SEQ ID NO: 9965 - RNA, 20 nt, synthetic construct
  source 1..20: mol_type = other RNA
acctcagcctcccaaagtgc

SEQ ID NO: 9966 - RNA, 20 nt, synthetic construct
  source 1..20: mol_type = other RNA
cgcttgtaatcccagcactt

SEQ ID NO: 9967 - RNA, 20 nt, synthetic construct
  source 1..20: mol_type = other RNA
cctcagcctcccaaagtgct

SEQ ID NO: 9968 - RNA, 20 nt, synthetic construct
  source 1..20: mol_type = other RNA
acaagcgtgagccactgcac

SEQ ID NO: 9969 - RNA, 20 nt, synthetic construct
  source 1..20: mol_type = other RNA
ttctctgtggcccggtgcag

SEQ ID NO: 9970 - RNA, 20 nt, synthetic construct
  source 1..20: mol_type = other RNA
caagcgtgagccactgcacc

SEQ ID NO: 9971 - RNA, 20 nt, synthetic construct
  source 1..20: mol_type = other RNA
gaagtactttctctgtggcc

SEQ ID NO: 9972 - RNA, 20 nt, synthetic construct
  source 1..20: mol_type = other RNA
gtggagaagtactttctctg

SEQ ID NO: 9973 - RNA, 20 nt, synthetic construct
  source 1..20: mol_type = other RNA
tgtctggtcggagagcaggg

SEQ ID NO: 9974 - RNA, 20 nt, synthetic construct
  source 1..20: mol_type = other RNA
aggtgtctggtcggagagca

SEQ ID NO: 9975 - RNA, 20 nt, synthetic construct
  source 1..20: mol_type = other RNA
aaggtgtctggtcggagagc

SEQ ID NO: 9976 - RNA, 20 nt, synthetic construct
  source 1..20: mol_type = other RNA
gccctgtcaaggtgtctggt

SEQ ID NO: 9977 - RNA, 20 nt, synthetic construct
  source 1..20: mol_type = other RNA
gtgtgccctgtcaaggtgtc

SEQ ID NO: 9978 - RNA, 20 nt, synthetic construct
  source 1..20: mol_type = other RNA
ctccgaccagacaccttgac

SEQ ID NO: 9979 - RNA, 20 nt, synthetic construct
  source 1..20: mol_type = other RNA
tccgaccagacaccttgaca

SEQ ID NO: 9980 - RNA, 20 nt, synthetic construct
  source 1..20: mol_type = other RNA
gtgcccggtgtgccctgtca

SEQ ID NO: 9981 - RNA, 20 nt, synthetic construct
  source 1..20: mol_type = other RNA
gacaccttgacagggcacac

SEQ ID NO: 9982 - RNA, 20 nt, synthetic construct
  source 1..20: mol_type = other RNA
acaccttgacagggcacacc

SEQ ID NO: 9983 - RNA, 20 nt, synthetic construct
  source 1..20: mol_type = other RNA
atcagtgtcttctgagtgcc

SEQ ID NO: 9984 - RNA, 20 nt, synthetic construct
  source 1..20: mol_type = other RNA
gggcactcagaagacactga

SEQ ID NO: 9985 - RNA, 20 nt, synthetic construct
  source 1..20: mol_type = other RNA
ggcactcagaagacactgat

SEQ ID NO: 9986 - RNA, 20 nt, synthetic construct
  source 1..20: mol_type = other RNA
ctggggaattagcaggctgg

SEQ ID NO: 9987 - RNA, 20 nt, synthetic construct
  source 1..20: mol_type = other RNA
tctggggaattagcaggctg

SEQ ID NO: 9988 - RNA, 20 nt, synthetic construct
  source 1..20: mol_type = other RNA
atctggggaattagcaggct

SEQ ID NO: 9989 - RNA, 20 nt, synthetic construct
  source 1..20: mol_type = other RNA
aatctggggaattagcaggc

SEQ ID NO: 9990 - RNA, 20 nt, synthetic construct
  source 1..20: mol_type = other RNA
ttgcaatctggggaattagc

SEQ ID NO: 9991 - RNA, 20 nt, synthetic construct
  source 1..20: mol_type = other RNA
gcccagcctgttgcaatctg

SEQ ID NO: 9992 - RNA, 20 nt, synthetic construct
  source 1..20: mol_type = other RNA
agcccagcctgttgcaatct

SEQ ID NO: 9993 - RNA, 20 nt, synthetic construct
  source 1..20: mol_type = other RNA
aagcccagcctgttgcaatc

SEQ ID NO: 9994 - RNA, 20 nt, synthetic construct
  source 1..20: mol_type = other RNA
ctaattccccagattgcaac

SEQ ID NO: 9995 - RNA, 20 nt, synthetic construct
  source 1..20: mol_type = other RNA
ttccccagattgcaacaggc

SEQ ID NO: 9996 - RNA, 20 nt, synthetic construct
  source 1..20: mol_type = other RNA
tccccagattgcaacaggct

SEQ ID NO: 9997 - RNA, 20 nt, synthetic construct
  source 1..20: mol_type = other RNA
tgcaacaggctgggcttcag

SEQ ID NO: 9998 - RNA, 20 nt, synthetic construct
  source 1..20: mol_type = other RNA
gtggcagctgcttttgtcta

SEQ ID NO: 9999 - RNA, 20 nt, synthetic construct
  source 1..20: mol_type = other RNA
tggcagctgcttttgtctat

SEQ ID NO: 10000 - RNA, 20 nt, synthetic construct
  source 1..20: mol_type = other RNA
actcaatgcactgacattgt

SEQ ID NO: 10001 - RNA, 20 nt, synthetic construct
  source 1..20: mol_type = other RNA
gccaggcctagctttggctt

SEQ ID NO: 10002 - RNA, 20 nt, synthetic construct
  source 1..20: mol_type = other RNA
tgttggccaaagccaaagct

SEQ ID NO: 10003 - RNA, 20 nt, synthetic construct
  source 1..20: mol_type = other RNA
catctggccaggcctagctt

SEQ ID NO: 10004 - RNA, 20 nt, synthetic construct
  source 1..20: mol_type = other RNA
gccaaagccaaagctaggcc

SEQ ID NO: 10005 - RNA, 20 nt, synthetic construct
  source 1..20: mol_type = other RNA
aagggctggtgcatctggcc

SEQ ID NO: 10006 - RNA, 20 nt, synthetic construct
  source 1..20: mol_type = other RNA
ctgctaagggctggtgcatc

SEQ ID NO: 10007 - RNA, 20 nt, synthetic construct
  source 1..20: mol_type = other RNA
gctgtttccctgctaagggc

SEQ ID NO: 10008 - RNA, 20 nt, synthetic construct
  source 1..20: mol_type = other RNA
cagatgcaccagcccttagc

SEQ ID NO: 10009 - RNA, 20 nt, synthetic construct
  source 1..20: mol_type = other RNA
agatgcaccagcccttagca

SEQ ID NO: 10010 - RNA, 20 nt, synthetic construct
  source 1..20: mol_type = other RNA
attagctgtttccctgctaa

SEQ ID NO: 10011 - RNA, 20 nt, synthetic construct
  source 1..20: mol_type = other RNA
cattagctgtttccctgcta

SEQ ID NO: 10012 - RNA, 20 nt, synthetic construct
  source 1..20: mol_type = other RNA
cttagcagggaaacagctaa

SEQ ID NO: 10013 - RNA, 20 nt, synthetic construct
  source 1..20: mol_type = other RNA
ttagcagggaaacagctaat

SEQ ID NO: 10014 - RNA, 20 nt, synthetic construct
  source 1..20: mol_type = other RNA
aacagctaatgggacactaa

SEQ ID NO: 10015 - RNA, 20 nt, synthetic construct
  source 1..20: mol_type = other RNA
acagctaatgggacactaat

SEQ ID NO: 10016 - RNA, 20 nt, synthetic construct
  source 1..20: mol_type = other RNA
cagctaatgggacactaatg

SEQ ID NO: 10017 - RNA, 20 nt, synthetic construct
  source 1..20: mol_type = other RNA
ctaatgggacactaatgggg

SEQ ID NO: 10018 - RNA, 20 nt, synthetic construct
  source 1..20: mol_type = other RNA
gacactaatggggcggtgag

SEQ ID NO: 10019 - RNA, 20 nt, synthetic construct
  source 1..20: mol_type = other RNA
acactaatggggcggtgaga

SEQ ID NO: 10020 - RNA, 20 nt, synthetic construct
  source 1..20: mol_type = other RNA
cactaatggggcggtgagag

SEQ ID NO: 10021 - RNA, 20 nt, synthetic construct
  source 1..20: mol_type = other RNA
gcggtgagaggggaacagac

SEQ ID NO: 10022 - RNA, 20 nt, synthetic construct
  source 1..20: mol_type = other RNA
aatgtagtgaaaaaagacac

SEQ ID NO: 10023 - RNA, 20 nt, synthetic construct
  source 1..20: mol_type = other RNA
aaatgtctctttaatgtcac

SEQ ID NO: 10024 - RNA, 20 nt, synthetic construct
  source 1..20: mol_type = other RNA
gtctctttaatgtcacaggc

SEQ ID NO: 10025 - RNA, 20 nt, synthetic construct
  source 1..20: mol_type = other RNA
ttaatgtcacaggcaggtcc

SEQ ID NO: 10026 - RNA, 20 nt, synthetic construct
  source 1..20: mol_type = other RNA
taatgtcacaggcaggtcca

SEQ ID NO: 10027 - RNA, 20 nt, synthetic construct
  source 1..20: mol_type = other RNA
cagggtatgaactcaaaccc

SEQ ID NO: 10028 - RNA, 20 nt, synthetic construct
  source 1..20: mol_type = other RNA
ggtaccccaaaatggtaaca

SEQ ID NO: 10029 - RNA, 20 nt, synthetic construct
  source 1..20: mol_type = other RNA
gggtaccccaaaatggtaac

SEQ ID NO: 10030 - RNA, 20 nt, synthetic construct
  source 1..20: mol_type = other RNA
ttcataccctgttaccattt

SEQ ID NO: 10031 - RNA, 20 nt, synthetic construct
  source 1..20: mol_type = other RNA
tcataccctgttaccatttt

SEQ ID NO: 10032 - RNA, 20 nt, synthetic construct
  source 1..20: mol_type = other RNA
cataccctgttaccattttg

SEQ ID NO: 10033 - RNA, 20 nt, synthetic construct
  source 1..20: mol_type = other RNA
gagcagtgggtaccccaaaa

SEQ ID NO: 10034 - RNA, 20 nt, synthetic construct
  source 1..20: mol_type = other RNA
tattagataaccagagcagt

SEQ ID NO: 10035 - RNA, 20 nt, synthetic construct
  source 1..20: mol_type = other RNA
ttttggggtacccactgctc

SEQ ID NO: 10036 - RNA, 20 nt, synthetic construct
  source 1..20: mol_type = other RNA
atattagataaccagagcag

SEQ ID NO: 10037 - RNA, 20 nt, synthetic construct
  source 1..20: mol_type = other RNA
taagccactatgatttgggg

SEQ ID NO: 10038 - RNA, 20 nt, synthetic construct
  source 1..20: mol_type = other RNA
ttttaagccactatgatttg

SEQ ID NO: 10039 - RNA, 20 nt, synthetic construct
  source 1..20: mol_type = other RNA
gttttaagccactatgattt

SEQ ID NO: 10040 - RNA, 20 nt, synthetic construct
  source 1..20: mol_type = other RNA
tgttttaagccactatgatt

SEQ ID NO: 10041 - RNA, 20 nt, synthetic construct
  source 1..20: mol_type = other RNA
caagccaccccaaatcatag

SEQ ID NO: 10042 - RNA, 20 nt, synthetic construct
  source 1..20: mol_type = other RNA
cacatatctgtcatttgagc

SEQ ID NO: 10043 - RNA, 20 nt, synthetic construct
  source 1..20: mol_type = other RNA
acatatctgtcatttgagca

SEQ ID NO: 10044 - RNA, 20 nt, synthetic construct
  source 1..20: mol_type = other RNA
gtcatttgagcagggctcag

SEQ ID NO: 10045 - RNA, 20 nt, synthetic construct
  source 1..20: mol_type = other RNA
tcatttgagcagggctcagc

SEQ ID NO: 10046 - RNA, 20 nt, synthetic construct
  source 1..20: mol_type = other RNA
catttgagcagggctcagcg

SEQ ID NO: 10047 - RNA, 20 nt, synthetic construct
  source 1..20: mol_type = other RNA
ctgacacagagtaggacaga

SEQ ID NO: 10048 - RNA, 20 nt, synthetic construct
  source 1..20: mol_type = other RNA
tgccccacctgacacagagt

SEQ ID NO: 10049 - RNA, 20 nt, synthetic construct
  source 1..20: mol_type = other RNA
cttctgtcctactctgtgtc

SEQ ID NO: 10050 - RNA, 20 nt, synthetic construct
  source 1..20: mol_type = other RNA
ctgtcctactctgtgtcagg

SEQ ID NO: 10051 - RNA, 20 nt, synthetic construct
  source 1..20: mol_type = other RNA
tgtcctactctgtgtcaggt

SEQ ID NO: 10052 - RNA, 20 nt, synthetic construct
  source 1..20: mol_type = other RNA
gtcctactctgtgtcaggtg

SEQ ID NO: 10053 - RNA, 20 nt, synthetic construct
  source 1..20: mol_type = other RNA
gtgtcaggtggggcagcttg

SEQ ID NO: 10054 - RNA, 20 nt, synthetic construct
  source 1..20: mol_type = other RNA
tgtcaggtggggcagcttga

SEQ ID NO: 10055 - RNA, 20 nt, synthetic construct
  source 1..20: mol_type = other RNA
aggtggggcagcttgagggt

SEQ ID NO: 10056 - RNA, 20 nt, synthetic construct
  source 1..20: mol_type = other RNA
ggtggggcagcttgagggtt

SEQ ID NO: 10057 - RNA, 20 nt, synthetic construct
  source 1..20: mol_type = other RNA
gggcagcttgagggttgggc

SEQ ID NO: 10058 - RNA, 20 nt, synthetic construct
  source 1..20: mol_type = other RNA
gtacagaagaatgagtcttc

SEQ ID NO: 10059 - RNA, 20 nt, synthetic construct
  source 1..20: mol_type = other RNA
cattcttctgtacgtctgac

SEQ ID NO: 10060 - RNA, 20 nt, synthetic construct
  source 1..20: mol_type = other RNA
gtacgtctgacaggcaatgc

SEQ ID NO: 10061 - RNA, 20 nt, synthetic construct
  source 1..20: mol_type = other RNA
tgacaggcaatgctggctgt

SEQ ID NO: 10062 - RNA, 20 nt, synthetic construct
  source 1..20: mol_type = other RNA
aggcaatgctggctgttggc

SEQ ID NO: 10063 - RNA, 20 nt, synthetic construct
  source 1..20: mol_type = other RNA
ggcaatgctggctgttggct

SEQ ID NO: 10064 - RNA, 20 nt, synthetic construct
  source 1..20: mol_type = other RNA
gcaatgctggctgttggctg

SEQ ID NO: 10065 - RNA, 20 nt, synthetic construct
  source 1..20: mol_type = other RNA
caatgctggctgttggctgg

SEQ ID NO: 10066 - RNA, 20 nt, synthetic construct
  source 1..20: mol_type = other RNA
actattccgtagtggcactg

SEQ ID NO: 10067 - RNA, 20 nt, synthetic construct
  source 1..20: mol_type = other RNA
tgggggcctcagtgccacta

SEQ ID NO: 10068 - RNA, 20 nt, synthetic construct
  source 1..20: mol_type = other RNA
cctagccaactattccgtag

SEQ ID NO: 10069 - RNA, 20 nt, synthetic construct
  source 1..20: mol_type = other RNA
cagtgccactacggaatagt

SEQ ID NO: 10070 - RNA, 20 nt, synthetic construct
  source 1..20: mol_type = other RNA
ccactacggaatagttggct

SEQ ID NO: 10071 - RNA, 20 nt, synthetic construct
  source 1..20: mol_type = other RNA
cccaactagcccacatggag

SEQ ID NO: 10072 - RNA, 20 nt, synthetic construct
  source 1..20: mol_type = other RNA
ttggctaggacccctccatg

SEQ ID NO: 10073 - RNA, 20 nt, synthetic construct
  source 1..20: mol_type = other RNA
gcccaactagcccacatgga

SEQ ID NO: 10074 - RNA, 20 nt, synthetic construct
  source 1..20: mol_type = other RNA
tggctaggacccctccatgt

SEQ ID NO: 10075 - RNA, 20 nt, synthetic construct
  source 1..20: mol_type = other RNA
agcccaactagcccacatgg

SEQ ID NO: 10076 - RNA, 20 nt, synthetic construct
  source 1..20: mol_type = other RNA
ggaagcccaactagcccaca

SEQ ID NO: 10077 - RNA, 20 nt, synthetic construct
  source 1..20: mol_type = other RNA
acccctccatgtgggctagt

SEQ ID NO: 10078 - RNA, 20 nt, synthetic construct
  source 1..20: mol_type = other RNA
cccctccatgtgggctagtt

SEQ ID NO: 10079 - RNA, 20 nt, synthetic construct
  source 1..20: mol_type = other RNA
aacccagccaccatactatg

SEQ ID NO: 10080 - RNA, 20 nt, synthetic construct
  source 1..20: mol_type = other RNA
agttgggcttcctcatagta

SEQ ID NO: 10081 - RNA, 20 nt, synthetic construct
  source 1..20: mol_type = other RNA
tgggcttcctcatagtatgg

SEQ ID NO: 10082 - RNA, 20 nt, synthetic construct
  source 1..20: mol_type = other RNA
cttcctcatagtatggtggc

SEQ ID NO: 10083 - RNA, 20 nt, synthetic construct
  source 1..20: mol_type = other RNA
ttcctcatagtatggtggct

SEQ ID NO: 10084 - RNA, 20 nt, synthetic construct
  source 1..20: mol_type = other RNA
tcatagtatggtggctgggt

SEQ ID NO: 10085 - RNA, 20 nt, synthetic construct
  source 1..20: mol_type = other RNA
tagtatggtggctgggttgg

SEQ ID NO: 10086 - RNA, 20 nt, synthetic construct
  source 1..20: mol_type = other RNA
agtatggtggctgggttgga

SEQ ID NO: 10087 - RNA, 20 nt, synthetic construct
  source 1..20: mol_type = other RNA
ctatcccctcctttcttttt

SEQ ID NO: 10088 - RNA, 20 nt, synthetic construct
  source 1..20: mol_type = other RNA
tctatcccctcctttctttt

SEQ ID NO: 10089 - RNA, 20 nt, synthetic construct
  source 1..20: mol_type = other RNA
ggagggtgtcccaaaaagaa

SEQ ID NO: 10090 - RNA, 20 nt, synthetic construct
  source 1..20: mol_type = other RNA
gggtgtcccaaaaagaaagg

SEQ ID NO: 10091 - RNA, 20 nt, synthetic construct
  source 1..20: mol_type = other RNA
ggtgtcccaaaaagaaagga

SEQ ID NO: 10092 - RNA, 20 nt, synthetic construct
  source 1..20: mol_type = other RNA
gtgtcccaaaaagaaaggag

SEQ ID NO: 10093 - RNA, 20 nt, synthetic construct
  source 1..20: mol_type = other RNA
taaggctaggttatgaaaag

SEQ ID NO: 10094 - RNA, 20 nt, synthetic construct
  source 1..20: mol_type = other RNA
actgtgtgacttctaaggct

SEQ ID NO: 10095 - RNA, 20 nt, synthetic construct
  source 1..20: mol_type = other RNA
gtaatactgtgtgacttcta

SEQ ID NO: 10096 - RNA, 20 nt, synthetic construct
  source 1..20: mol_type = other RNA
ctacatatatatgttttaag

SEQ ID NO: 10097 - RNA, 20 nt, synthetic construct
  source 1..20: mol_type = other RNA
atatatatgttttaagaggc

SEQ ID NO: 10098 - RNA, 20 nt, synthetic construct
  source 1..20: mol_type = other RNA
tatatatgttttaagaggca

SEQ ID NO: 10099 - RNA, 20 nt, synthetic construct
  source 1..20: mol_type = other RNA
tctcactctgtcgcccagtc

SEQ ID NO: 10100 - RNA, 20 nt, synthetic construct
  source 1..20: mol_type = other RNA
ataccactgcattccagact

SEQ ID NO: 10101 - RNA, 20 nt, synthetic construct
  source 1..20: mol_type = other RNA
cataccactgcattccagac

SEQ ID NO: 10102 - RNA, 20 nt, synthetic construct
  source 1..20: mol_type = other RNA
tcgcccagtctggaatgcag

SEQ ID NO: 10103 - RNA, 20 nt, synthetic construct
  source 1..20: mol_type = other RNA
ggaatgcagtggtatgatca

SEQ ID NO: 10104 - RNA, 20 nt, synthetic construct
  source 1..20: mol_type = other RNA
tcacttagcccaggaggttg

SEQ ID NO: 10105 - RNA, 20 nt, synthetic construct
  source 1..20: mol_type = other RNA
tcactgcagcctcaacctcc

SEQ ID NO: 10106 - RNA, 20 nt, synthetic construct
  source 1..20: mol_type = other RNA
cactgcagcctcaacctcct

SEQ ID NO: 10107 - RNA, 20 nt, synthetic construct
  source 1..20: mol_type = other RNA
ggaggatcacttagcccagg

SEQ ID NO: 10108 - RNA, 20 nt, synthetic construct
  source 1..20: mol_type = other RNA
gtgggaggatcacttagccc

SEQ ID NO: 10109 - RNA, 20 nt, synthetic construct
  source 1..20: mol_type = other RNA
attcgggaggctgaggtggg

SEQ ID NO: 10110 - RNA, 20 nt, synthetic construct
  source 1..20: mol_type = other RNA
gctattcgggaggctgaggt

SEQ ID NO: 10111 - RNA, 20 nt, synthetic construct
  source 1..20: mol_type = other RNA
agctattcgggaggctgagg

SEQ ID NO: 10112 - RNA, 20 nt, synthetic construct
  source 1..20: mol_type = other RNA
cccagctattcgggaggctg

SEQ ID NO: 10113 - RNA, 20 nt, synthetic construct
  source 1..20: mol_type = other RNA
tgtagtcccagctattcggg

SEQ ID NO: 10114 - RNA, 20 nt, synthetic construct
  source 1..20: mol_type = other RNA
acctgtagtcccagctattc

SEQ ID NO: 10115 - RNA, 20 nt, synthetic construct
  source 1..20: mol_type = other RNA
acctcagcctcccgaatagc

SEQ ID NO: 10116 - RNA, 20 nt, synthetic construct
  source 1..20: mol_type = other RNA
cacctgtagtcccagctatt

SEQ ID NO: 10117 - RNA, 20 nt, synthetic construct
  source 1..20: mol_type = other RNA
cctcagcctcccgaatagct

SEQ ID NO: 10118 - RNA, 20 nt, synthetic construct
  source 1..20: mol_type = other RNA
tcccgaatagctgggactac

SEQ ID NO: 10119 - RNA, 20 nt, synthetic construct
  source 1..20: mol_type = other RNA
aactaaagattaactgggct

SEQ ID NO: 10120 - RNA, 20 nt, synthetic construct
  source 1..20: mol_type = other RNA
aataaaactaaagattaact

SEQ ID NO: 10121 - RNA, 20 nt, synthetic construct
  source 1..20: mol_type = other RNA
aaataaaactaaagattaac

SEQ ID NO: 10122 - RNA, 20 nt, synthetic construct
  source 1..20: mol_type = other RNA
agttttatttttgtagagcc

SEQ ID NO: 10123 - RNA, 20 nt, synthetic construct
  source 1..20: mol_type = other RNA
gttttatttttgtagagcca

SEQ ID NO: 10124 - RNA, 20 nt, synthetic construct
  source 1..20: mol_type = other RNA
tgggcaacatagtgagaccc

SEQ ID NO: 10125 - RNA, 20 nt, synthetic construct
  source 1..20: mol_type = other RNA
agggtctcactatgttgccc

SEQ ID NO: 10126 - RNA, 20 nt, synthetic construct
  source 1..20: mol_type = other RNA
tctcactatgttgcccaggc

SEQ ID NO: 10127 - RNA, 20 nt, synthetic construct
  source 1..20: mol_type = other RNA
caggagttcaagacctgcct

SEQ ID NO: 10128 - RNA, 20 nt, synthetic construct
  source 1..20: mol_type = other RNA
ccaggagttcaagacctgcc

SEQ ID NO: 10129 - RNA, 20 nt, synthetic construct
  source 1..20: mol_type = other RNA
ccaggcaggtcttgaactcc

SEQ ID NO: 10130 - RNA, 20 nt, synthetic construct
  source 1..20: mol_type = other RNA
caggagaatcacttgaggcc

SEQ ID NO: 10131 - RNA, 20 nt, synthetic construct
  source 1..20: mol_type = other RNA
tgaggcaggagaatcacttg

SEQ ID NO: 10132 - RNA, 20 nt, synthetic construct
  source 1..20: mol_type = other RNA
gcactttgggaggctgaggc

SEQ ID NO: 10133 - RNA, 20 nt, synthetic construct
  source 1..20: mol_type = other RNA
cccagcactttgggaggctg

SEQ ID NO: 10134 - RNA, 20 nt, synthetic construct
  source 1..20: mol_type = other RNA
tgtaatcccagcactttggg

SEQ ID NO: 10135 - RNA, 20 nt, synthetic construct
  source 1..20: mol_type = other RNA
acctgtaatcccagcacttt

SEQ ID NO: 10136 - RNA, 20 nt, synthetic construct
  source 1..20: mol_type = other RNA
gcctcagcctcccaaagtgc

SEQ ID NO: 10137 - RNA, 20 nt, synthetic construct
  source 1..20: mol_type = other RNA
cacctgtaatcccagcactt

SEQ ID NO: 10138 - RNA, 20 nt, synthetic construct
  source 1..20: mol_type = other RNA
cctcagcctcccaaagtgct

SEQ ID NO: 10139 - RNA, 20 nt, synthetic construct
  source 1..20: mol_type = other RNA
tcccaaagtgctgggattac

SEQ ID NO: 10140 - RNA, 20 nt, synthetic construct
  source 1..20: mol_type = other RNA
cagaagtgggctgggtgtgg

SEQ ID NO: 10141 - RNA, 20 nt, synthetic construct
  source 1..20: mol_type = other RNA
tggcagaagtgggctgggtg

SEQ ID NO: 10142 - RNA, 20 nt, synthetic construct
  source 1..20: mol_type = other RNA
gaatatggcagaagtgggct

SEQ ID NO: 10143 - RNA, 20 nt, synthetic construct
  source 1..20: mol_type = other RNA
agaatatggcagaagtgggc

SEQ ID NO: 10144 - RNA, 20 nt, synthetic construct
  source 1..20: mol_type = other RNA
caacagaatatggcagaagt

SEQ ID NO: 10145 - RNA, 20 nt, synthetic construct
  source 1..20: mol_type = other RNA
ccaacagaatatggcagaag

SEQ ID NO: 10146 - RNA, 20 nt, synthetic construct
  source 1..20: mol_type = other RNA
tcacactggccaacagaata

SEQ ID NO: 10147 - RNA, 20 nt, synthetic construct
  source 1..20: mol_type = other RNA
ccacttctgccatattctgt

SEQ ID NO: 10148 - RNA, 20 nt, synthetic construct
  source 1..20: mol_type = other RNA
agtagcaatccttgtcacac

SEQ ID NO: 10149 - RNA, 20 nt, synthetic construct
  source 1..20: mol_type = other RNA
ttctgttggccagtgtgaca

SEQ ID NO: 10150 - RNA, 20 nt, synthetic construct
  source 1..20: mol_type = other RNA
gtggtgaaaggagggtgggt

SEQ ID NO: 10151 - RNA, 20 nt, synthetic construct
  source 1..20: mol_type = other RNA
acatgtggtgaaaggagggt

SEQ ID NO: 10152 - RNA, 20 nt, synthetic construct
  source 1..20: mol_type = other RNA
cacatgtggtgaaaggaggg

SEQ ID NO: 10153 - RNA, 20 nt, synthetic construct
  source 1..20: mol_type = other RNA
gtgcacatgtggtgaaagga

SEQ ID NO: 10154 - RNA, 20 nt, synthetic construct
  source 1..20: mol_type = other RNA
tgtgcacatgtggtgaaagg

SEQ ID NO: 10155 - RNA, 20 nt, synthetic construct
  source 1..20: mol_type = other RNA
gcatgtgcacatgtggtgaa

SEQ ID NO: 10156 - RNA, 20 nt, synthetic construct
  source 1..20: mol_type = other RNA
cacacgtgcatgtgcacatg

SEQ ID NO: 10157 - RNA, 20 nt, synthetic construct
  source 1..20: mol_type = other RNA
acttgagccaaggtgggctc

SEQ ID NO: 10158 - RNA, 20 nt, synthetic construct
  source 1..20: mol_type = other RNA
gcacacaccagagcccacct

SEQ ID NO: 10159 - RNA, 20 nt, synthetic construct
  source 1..20: mol_type = other RNA
aagaggacttgagccaaggt

SEQ ID NO: 10160 - RNA, 20 nt, synthetic construct
  source 1..20: mol_type = other RNA
aaagaggacttgagccaagg

SEQ ID NO: 10161 - RNA, 20 nt, synthetic construct
  source 1..20: mol_type = other RNA
agaaaagaggacttgagcca

SEQ ID NO: 10162 - RNA, 20 nt, synthetic construct
  source 1..20: mol_type = other RNA
gaaaagtcctctcagaaaag

SEQ ID NO: 10163 - RNA, 20 nt, synthetic construct
  source 1..20: mol_type = other RNA
ctcaagtcctcttttctgag

SEQ ID NO: 10164 - RNA, 20 nt, synthetic construct
  source 1..20: mol_type = other RNA
tctgagaggacttttctttg

SEQ ID NO: 10165 - RNA, 20 nt, synthetic construct
  source 1..20: mol_type = other RNA
ttaattttccactgaatttt

SEQ ID NO: 10166 - RNA, 20 nt, synthetic construct
  source 1..20: mol_type = other RNA
tgtggcttcctaaaattcag

SEQ ID NO: 10167 - RNA, 20 nt, synthetic construct
  source 1..20: mol_type = other RNA
tcagtggaaaattaattgtt

SEQ ID NO: 10168 - RNA, 20 nt, synthetic construct
  source 1..20: mol_type = other RNA
cagtggaaaattaattgttt

SEQ ID NO: 10169 - RNA, 20 nt, synthetic construct
  source 1..20: mol_type = other RNA
agtggaaaattaattgtttg

SEQ ID NO: 10170 - RNA, 20 nt, synthetic construct
  source 1..20: mol_type = other RNA
taattgtttggggatgagaa

SEQ ID NO: 10171 - RNA, 20 nt, synthetic construct
  source 1..20: mol_type = other RNA
cattccccttggtaagcttt

SEQ ID NO: 10172 - RNA, 20 nt, synthetic construct
  source 1..20: mol_type = other RNA
gaagcaccaaaagcttacca

SEQ ID NO: 10173 - RNA, 20 nt, synthetic construct
  source 1..20: mol_type = other RNA
aagcaccaaaagcttaccaa

SEQ ID NO: 10174 - RNA, 20 nt, synthetic construct
  source 1..20: mol_type = other RNA
agcaccaaaagcttaccaag

SEQ ID NO: 10175 - RNA, 20 nt, synthetic construct
  source 1..20: mol_type = other RNA
gcagaggcaaacattcccct

SEQ ID NO: 10176 - RNA, 20 nt, synthetic construct
  source 1..20: mol_type = other RNA
gagctgtgtgtcagaggcag

SEQ ID NO: 10177 - RNA, 20 nt, synthetic construct
  source 1..20: mol_type = other RNA
aggacagagctgtgtgtcag

SEQ ID NO: 10178 - RNA, 20 nt, synthetic construct
  source 1..20: mol_type = other RNA
tctgacacacagctctgtcc

SEQ ID NO: 10179 - RNA, 20 nt, synthetic construct
  source 1..20: mol_type = other RNA
ctgacacacagctctgtcct

SEQ ID NO: 10180 - RNA, 20 nt, synthetic construct
  source 1..20: mol_type = other RNA
gctctgtcctgggagtgagc

SEQ ID NO: 10181 - RNA, 20 nt, synthetic construct
  source 1..20: mol_type = other RNA
gcggagacggagtcccacct

SEQ ID NO: 10182 - RNA, 20 nt, synthetic construct
  source 1..20: mol_type = other RNA
ggactccctgcagccaaggt

SEQ ID NO: 10183 - RNA, 20 nt, synthetic construct
  source 1..20: mol_type = other RNA
cggactccctgcagccaagg

SEQ ID NO: 10184 - RNA, 20 nt, synthetic construct
  source 1..20: mol_type = other RNA
tttcggactccctgcagcca

SEQ ID NO: 10185 - RNA, 20 nt, synthetic construct
  source 1..20: mol_type = other RNA
cggagtcccaccttggctgc

SEQ ID NO: 10186 - RNA, 20 nt, synthetic construct
  source 1..20: mol_type = other RNA
ggagtcccaccttggctgca

SEQ ID NO: 10187 - RNA, 20 nt, synthetic construct
  source 1..20: mol_type = other RNA
ttggctgcagggagtccgaa

SEQ ID NO: 10188 - RNA, 20 nt, synthetic construct
  source 1..20: mol_type = other RNA
tggctgcagggagtccgaaa

SEQ ID NO: 10189 - RNA, 20 nt, synthetic construct
  source 1..20: mol_type = other RNA
cggagcttccaagtcccttt

SEQ ID NO: 10190 - RNA, 20 nt, synthetic construct
  source 1..20: mol_type = other RNA
cagggagtccgaaagggact

SEQ ID NO: 10191 - RNA, 20 nt, synthetic construct
  source 1..20: mol_type = other RNA
gcagctcgctgggtagaaag

SEQ ID NO: 10192 - RNA, 20 nt, synthetic construct
  source 1..20: mol_type = other RNA
agtcgtgccggcagctcgct

SEQ ID NO: 10193 - RNA, 20 nt, synthetic construct
  source 1..20: mol_type = other RNA
cagtcgtgccggcagctcgc

SEQ ID NO: 10194 - RNA, 20 nt, synthetic construct
  source 1..20: mol_type = other RNA
ctttctacccagcgagctgc

SEQ ID NO: 10195 - RNA, 20 nt, synthetic construct
  source 1..20: mol_type = other RNA
gtgaaaagcaacagtcgtgc

SEQ ID NO: 10196 - RNA, 20 nt, synthetic construct
  source 1..20: mol_type = other RNA
cacgactgttgcttttcact

SEQ ID NO: 10197 - RNA, 20 nt, synthetic construct
  source 1..20: mol_type = other RNA
acgactgttgcttttcactc

SEQ ID NO: 10198 - RNA, 20 nt, synthetic construct
  source 1..20: mol_type = other RNA
agctaagatgtcttgaattg

SEQ ID NO: 10199 - RNA, 20 nt, synthetic construct
  source 1..20: mol_type = other RNA
aagctaagatgtcttgaatt

SEQ ID NO: 10200 - RNA, 20 nt, synthetic construct
  source 1..20: mol_type = other RNA
taagctaagatgtcttgaat

SEQ ID NO: 10201 - RNA, 20 nt, synthetic construct
  source 1..20: mol_type = other RNA
aagacatcttagcttactcc

SEQ ID NO: 10202 - RNA, 20 nt, synthetic construct
  source 1..20: mol_type = other RNA
acatcttagcttactcctgg

SEQ ID NO: 10203 - RNA, 20 nt, synthetic construct
  source 1..20: mol_type = other RNA
aggcagctcccactgccacc

SEQ ID NO: 10204 - RNA, 20 nt, synthetic construct
  source 1..20: mol_type = other RNA
tagcttactcctggtggcag

SEQ ID NO: 10205 - RNA, 20 nt, synthetic construct
  source 1..20: mol_type = other RNA
agcttactcctggtggcagt

SEQ ID NO: 10206 - RNA, 20 nt, synthetic construct
  source 1..20: mol_type = other RNA
ctggtgagctggagctgaac

SEQ ID NO: 10207 - RNA, 20 nt, synthetic construct
  source 1..20: mol_type = other RNA
gggcactggggctggtgagc

SEQ ID NO: 10208 - RNA, 20 nt, synthetic construct
  source 1..20: mol_type = other RNA
gatcctgtgggcactggggc

SEQ ID NO: 10209 - RNA, 20 nt, synthetic construct
  source 1..20: mol_type = other RNA
gactgatcctgtgggcactg

SEQ ID NO: 10210 - RNA, 20 nt, synthetic construct
  source 1..20: mol_type = other RNA
agactgatcctgtgggcact

SEQ ID NO: 10211 - RNA, 20 nt, synthetic construct
  source 1..20: mol_type = other RNA
cagactgatcctgtgggcac

SEQ ID NO: 10212 - RNA, 20 nt, synthetic construct
  source 1..20: mol_type = other RNA
tcaccagccccagtgcccac

SEQ ID NO: 10213 - RNA, 20 nt, synthetic construct
  source 1..20: mol_type = other RNA
gggaatcagactgatcctgt

SEQ ID NO: 10214 - RNA, 20 nt, synthetic construct
  source 1..20: mol_type = other RNA
tgggaatcagactgatcctg

SEQ ID NO: 10215 - RNA, 20 nt, synthetic construct
  source 1..20: mol_type = other RNA
tggggagaggagcagagctt

SEQ ID NO: 10216 - RNA, 20 nt, synthetic construct
  source 1..20: mol_type = other RNA
ctggggagaggagcagagct

SEQ ID NO: 10217 - RNA, 20 nt, synthetic construct
  source 1..20: mol_type = other RNA
agctctcacttgctggggag

SEQ ID NO: 10218 - RNA, 20 nt, synthetic construct
  source 1..20: mol_type = other RNA
cacccagctctcacttgctg

SEQ ID NO: 10219 - RNA, 20 nt, synthetic construct
  source 1..20: mol_type = other RNA
acacccagctctcacttgct

SEQ ID NO: 10220 - RNA, 20 nt, synthetic construct
  source 1..20: mol_type = other RNA
gacacccagctctcacttgc

SEQ ID NO: 10221 - RNA, 20 nt, synthetic construct
  source 1..20: mol_type = other RNA
tctccccagcaagtgagagc

SEQ ID NO: 10222 - RNA, 20 nt, synthetic construct
  source 1..20: mol_type = other RNA
ctccccagcaagtgagagct

SEQ ID NO: 10223 - RNA, 20 nt, synthetic construct
  source 1..20: mol_type = other RNA
agtgagagctgggtgtcaag

SEQ ID NO: 10224 - RNA, 20 nt, synthetic construct
  source 1..20: mol_type = other RNA
gtgagagctgggtgtcaaga

SEQ ID NO: 10225 - RNA, 20 nt, synthetic construct
  source 1..20: mol_type = other RNA
ctgggtgtcaagagggtctg

SEQ ID NO: 10226 - RNA, 20 nt, synthetic construct
  source 1..20: mol_type = other RNA
gggtctgaggaatccagacc

SEQ ID NO: 10227 - RNA, 20 nt, synthetic construct
  source 1..20: mol_type = other RNA
atcaaccacgcagccgggtc

SEQ ID NO: 10228 - RNA, 20 nt, synthetic construct
  source 1..20: mol_type = other RNA
agatcatcaaccacgcagcc

SEQ ID NO: 10229 - RNA, 20 nt, synthetic construct
  source 1..20: mol_type = other RNA
ggaatccagacccggctgcg

SEQ ID NO: 10230 - RNA, 20 nt, synthetic construct
  source 1..20: mol_type = other RNA
aagatcatcaaccacgcagc

SEQ ID NO: 10231 - RNA, 20 nt, synthetic construct
  source 1..20: mol_type = other RNA
ggttgatgatctttgcagac

SEQ ID NO: 10232 - RNA, 20 nt, synthetic construct
  source 1..20: mol_type = other RNA
tgcagccagttcgaggcagg

SEQ ID NO: 10233 - RNA, 20 nt, synthetic construct
  source 1..20: mol_type = other RNA
ctttgcagccagttcgaggc

SEQ ID NO: 10234 - RNA, 20 nt, synthetic construct
  source 1..20: mol_type = other RNA
aagcacctcctgcctcgaac

SEQ ID NO: 10235 - RNA, 20 nt, synthetic construct
  source 1..20: mol_type = other RNA
taccctttgcagccagttcg

SEQ ID NO: 10236 - RNA, 20 nt, synthetic construct
  source 1..20: mol_type = other RNA
ctgcctcgaactggctgcaa

SEQ ID NO: 10237 - RNA, 20 nt, synthetic construct
  source 1..20: mol_type = other RNA
tgcctcgaactggctgcaaa

SEQ ID NO: 10238 - RNA, 20 nt, synthetic construct
  source 1..20: mol_type = other RNA
aactggctgcaaagggtatc

SEQ ID NO: 10239 - RNA, 20 nt, synthetic construct
  source 1..20: mol_type = other RNA
ggtatcaggtgctgccatcc

SEQ ID NO: 10240 - RNA, 20 nt, synthetic construct
  source 1..20: mol_type = other RNA
atttacaagctgaacctgga

SEQ ID NO: 10241 - RNA, 20 nt, synthetic construct
  source 1..20: mol_type = other RNA
agctatttacaagctgaacc

SEQ ID NO: 10242 - RNA, 20 nt, synthetic construct
  source 1..20: mol_type = other RNA
gttcagcttgtaaatagctc

SEQ ID NO: 10243 - RNA, 20 nt, synthetic construct
  source 1..20: mol_type = other RNA
agctcaggtgtcaccctgca

SEQ ID NO: 10244 - RNA, 20 nt, synthetic construct
  source 1..20: mol_type = other RNA
gctcaggtgtcaccctgcaa

SEQ ID NO: 10245 - RNA, 20 nt, synthetic construct
  source 1..20: mol_type = other RNA
aagtgcagggatcccttgca

SEQ ID NO: 10246 - RNA, 20 nt, synthetic construct
  source 1..20: mol_type = other RNA
caagtgcagggatcccttgc

SEQ ID NO: 10247 - RNA, 20 nt, synthetic construct
  source 1..20: mol_type = other RNA
ctgtagagtctgcaagtgca

SEQ ID NO: 10248 - RNA, 20 nt, synthetic construct
  source 1..20: mol_type = other RNA
tctgtagagtctgcaagtgc

SEQ ID NO: 10249 - RNA, 20 nt, synthetic construct
  source 1..20: mol_type = other RNA
tgcacttgcagactctacag

SEQ ID NO: 10250 - RNA, 20 nt, synthetic construct
  source 1..20: mol_type = other RNA
tgcagactctacagaggcca

SEQ ID NO: 10251 - RNA, 20 nt, synthetic construct
  source 1..20: mol_type = other RNA
gcagactctacagaggccat

SEQ ID NO: 10252 - RNA, 20 nt, synthetic construct
  source 1..20: mol_type = other RNA
gcgcacacacaggaggccca

SEQ ID NO: 10253 - RNA, 20 nt, synthetic construct
  source 1..20: mol_type = other RNA
cctgtaggcgcacacacagg

SEQ ID NO: 10254 - RNA, 20 nt, synthetic construct
  source 1..20: mol_type = other RNA
actcctgtaggcgcacacac

SEQ ID NO: 10255 - RNA, 20 nt, synthetic construct
  source 1..20: mol_type = other RNA
cctcctgtgtgtgcgcctac

SEQ ID NO: 10256 - RNA, 20 nt, synthetic construct
  source 1..20: mol_type = other RNA
accttagtgctcactcctgt

SEQ ID NO: 10257 - RNA, 20 nt, synthetic construct
  source 1..20: mol_type = other RNA
gcctacaggagtgagcacta

SEQ ID NO: 10258 - RNA, 20 nt, synthetic construct
  source 1..20: mol_type = other RNA
aaacctggcacatggcacag

SEQ ID NO: 10259 - RNA, 20 nt, synthetic construct
  source 1..20: mol_type = other RNA
catccactgtgccatgtgcc

SEQ ID NO: 10260 - RNA, 20 nt, synthetic construct
  source 1..20: mol_type = other RNA
cagaccaaaaacctggcaca

SEQ ID NO: 10261 - RNA, 20 nt, synthetic construct
  source 1..20: mol_type = other RNA
tgtgccatgtgccaggtttt

SEQ ID NO: 10262 - RNA, 20 nt, synthetic construct
  source 1..20: mol_type = other RNA
agtgggtcagaccaaaaacc

SEQ ID NO: 10263 - RNA, 20 nt, synthetic construct
  source 1..20: mol_type = other RNA
tcacacagaccaaaagcagt

SEQ ID NO: 10264 - RNA, 20 nt, synthetic construct
  source 1..20: mol_type = other RNA
atcacacagaccaaaagcag

SEQ ID NO: 10265 - RNA, 20 nt, synthetic construct
  source 1..20: mol_type = other RNA
ttggtctgacccactgcttt

SEQ ID NO: 10266 - RNA, 20 nt, synthetic construct
  source 1..20: mol_type = other RNA
gtctgtgtgatgatgaaatg

SEQ ID NO: 10267 - RNA, 20 nt, synthetic construct
  source 1..20: mol_type = other RNA
tcgttagtgttaataactgc

SEQ ID NO: 10268 - RNA, 20 nt, synthetic construct
  source 1..20: mol_type = other RNA
ttcactcttattgcccacgc

SEQ ID NO: 10269 - RNA, 20 nt, synthetic construct
  source 1..20: mol_type = other RNA
atgccactgcactccagcgt

SEQ ID NO: 10270 - RNA, 20 nt, synthetic construct
  source 1..20: mol_type = other RNA
catgccactgcactccagcg

SEQ ID NO: 10271 - RNA, 20 nt, synthetic construct
  source 1..20: mol_type = other RNA
ttgcccacgctggagtgcag

SEQ ID NO: 10272 - RNA, 20 nt, synthetic construct
  source 1..20: mol_type = other RNA
ggagtgcagtggcatgatct

SEQ ID NO: 10273 - RNA, 20 nt, synthetic construct
  source 1..20: mol_type = other RNA
tgcttgaacccaggaggcag

SEQ ID NO: 10274 - RNA, 20 nt, synthetic construct
  source 1..20: mol_type = other RNA
tcactgcaacctctgcctcc

SEQ ID NO: 10275 - RNA, 20 nt, synthetic construct
  source 1..20: mol_type = other RNA
cactgcaacctctgcctcct

SEQ ID NO: 10276 - RNA, 20 nt, synthetic construct
  source 1..20: mol_type = other RNA
gagaattgcttgaacccagg

SEQ ID NO: 10277 - RNA, 20 nt, synthetic construct
  source 1..20: mol_type = other RNA
tgggagaattgcttgaaccc

SEQ ID NO: 10278 - RNA, 20 nt, synthetic construct
  source 1..20: mol_type = other RNA
gctacttgggaggctgaggt

SEQ ID NO: 10279 - RNA, 20 nt, synthetic construct
  source 1..20: mol_type = other RNA
agctacttgggaggctgagg

SEQ ID NO: 10280 - RNA, 20 nt, synthetic construct
  source 1..20: mol_type = other RNA
cccagctacttgggaggctg

SEQ ID NO: 10281 - RNA, 20 nt, synthetic construct
  source 1..20: mol_type = other RNA
tgtaatcccagctacttggg

SEQ ID NO: 10282 - RNA, 20 nt, synthetic construct
  source 1..20: mol_type = other RNA
gcctgtaatcccagctactt

SEQ ID NO: 10283 - RNA, 20 nt, synthetic construct
  source 1..20: mol_type = other RNA
acctcagcctcccaagtagc

SEQ ID NO: 10284 - RNA, 20 nt, synthetic construct
  source 1..20: mol_type = other RNA
tgcctgtaatcccagctact

SEQ ID NO: 10285 - RNA, 20 nt, synthetic construct
  source 1..20: mol_type = other RNA
cctcagcctcccaagtagct

SEQ ID NO: 10286 - RNA, 20 nt, synthetic construct
  source 1..20: mol_type = other RNA
tcccaagtagctgggattac

SEQ ID NO: 10287 - RNA, 20 nt, synthetic construct
  source 1..20: mol_type = other RNA
caaaaattagccaggcgtgg

SEQ ID NO: 10288 - RNA, 20 nt, synthetic construct
  source 1..20: mol_type = other RNA
caggcatgcaccaccacgcc

SEQ ID NO: 10289 - RNA, 20 nt, synthetic construct
  source 1..20: mol_type = other RNA
atacaaaaattagccaggcg

SEQ ID NO: 10290 - RNA, 20 nt, synthetic construct
  source 1..20: mol_type = other RNA
taaaaatacaaaaattagcc

SEQ ID NO: 10291 - RNA, 20 nt, synthetic construct
  source 1..20: mol_type = other RNA
ttttgtatttttagtagaga

SEQ ID NO: 10292 - RNA, 20 nt, synthetic construct
  source 1..20: mol_type = other RNA
gagatggagtttcaccatgt

SEQ ID NO: 10293 - RNA, 20 nt, synthetic construct
  source 1..20: mol_type = other RNA
gattaccagcctggccaaca

SEQ ID NO: 10294 - RNA, 20 nt, synthetic construct
  source 1..20: mol_type = other RNA
ggagtttcaccatgttggcc

SEQ ID NO: 10295 - RNA, 20 nt, synthetic construct
  source 1..20: mol_type = other RNA
tttcaccatgttggccaggc

SEQ ID NO: 10296 - RNA, 20 nt, synthetic construct
  source 1..20: mol_type = other RNA
aggcaggcagattaccagcc

SEQ ID NO: 10297 - RNA, 20 nt, synthetic construct
  source 1..20: mol_type = other RNA
ggctggtaatctgcctgcct

SEQ ID NO: 10298 - RNA, 20 nt, synthetic construct
  source 1..20: mol_type = other RNA
gcactttgggaggccaaggc

SEQ ID NO: 10299 - RNA, 20 nt, synthetic construct
  source 1..20: mol_type = other RNA
cccagcactttgggaggcca

SEQ ID NO: 10300 - RNA, 20 nt, synthetic construct
  source 1..20: mol_type = other RNA
tgtaatcccagcactttggg

SEQ ID NO: 10301 - RNA, 20 nt, synthetic construct
  source 1..20: mol_type = other RNA
ccctgtaatcccagcacttt

SEQ ID NO: 10302 - RNA, 20 nt, synthetic construct
  source 1..20: mol_type = other RNA
gccttggcctcccaaagtgc

SEQ ID NO: 10303 - RNA, 20 nt, synthetic construct
  source 1..20: mol_type = other RNA
cccctgtaatcccagcactt

SEQ ID NO: 10304 - RNA, 20 nt, synthetic construct
  source 1..20: mol_type = other RNA
ccttggcctcccaaagtgct

SEQ ID NO: 10305 - RNA, 20 nt, synthetic construct
  source 1..20: mol_type = other RNA
tcccaaagtgctgggattac

SEQ ID NO: 10306 - RNA, 20 nt, synthetic construct
  source 1..20: mol_type = other RNA
cccaaagtgctgggattaca

SEQ ID NO: 10307 - RNA, 20 nt, synthetic construct
  source 1..20: mol_type = other RNA
ccaaagtgctgggattacag

SEQ ID NO: 10308 - RNA, 20 nt, synthetic construct
  source 1..20: mol_type = other RNA
acagtagtggccgggtgcgg

SEQ ID NO: 10309 - RNA, 20 nt, synthetic construct
  source 1..20: mol_type = other RNA
caggggtgagccaccgcacc

SEQ ID NO: 10310 - RNA, 20 nt, synthetic construct
  source 1..20: mol_type = other RNA
taaacagtagtggccgggtg

SEQ ID NO: 10311 - RNA, 20 nt, synthetic construct
  source 1..20: mol_type = other RNA
ttaaataaacagtagtggcc

SEQ ID NO: 10312 - RNA, 20 nt, synthetic construct
  source 1..20: mol_type = other RNA
attaaataaacagtagtggc

SEQ ID NO: 10313 - RNA, 20 nt, synthetic construct
  source 1..20: mol_type = other RNA
gctcattaaataaacagtag

SEQ ID NO: 10314 - RNA, 20 nt, synthetic construct
  source 1..20: mol_type = other RNA
tttcccttgcactgtgataa

SEQ ID NO: 10315 - RNA, 20 nt, synthetic construct
  source 1..20: mol_type = other RNA
atttcccttgcactgtgata

SEQ ID NO: 10316 - RNA, 20 nt, synthetic construct
  source 1..20: mol_type = other RNA
aaagcccttatcacagtgca

SEQ ID NO: 10317 - RNA, 20 nt, synthetic construct
  source 1..20: mol_type = other RNA
aagcccttatcacagtgcaa

SEQ ID NO: 10318 - RNA, 20 nt, synthetic construct
  source 1..20: mol_type = other RNA
taggagtttagcacagtgtc

SEQ ID NO: 10319 - RNA, 20 nt, synthetic construct
  source 1..20: mol_type = other RNA
gactcttatccctcttgagt

SEQ ID NO: 10320 - RNA, 20 nt, synthetic construct
  source 1..20: mol_type = other RNA
gtgctaaactcctactcaag

SEQ ID NO: 10321 - RNA, 20 nt, synthetic construct
  source 1..20: mol_type = other RNA
tgctaaactcctactcaaga

SEQ ID NO: 10322 - RNA, 20 nt, synthetic construct
  source 1..20: mol_type = other RNA
ctcaagagggataagagtct

SEQ ID NO: 10323 - RNA, 20 nt, synthetic construct
  source 1..20: mol_type = other RNA
tcaagagggataagagtcta

SEQ ID NO: 10324 - RNA, 20 nt, synthetic construct
  source 1..20: mol_type = other RNA
caagagggataagagtctag

SEQ ID NO: 10325 - RNA, 20 nt, synthetic construct
  source 1..20: mol_type = other RNA
gataagagtctaggggcaag

SEQ ID NO: 10326 - RNA, 20 nt, synthetic construct
  source 1..20: mol_type = other RNA
gactctagaacgagattgcc

SEQ ID NO: 10327 - RNA, 20 nt, synthetic construct
  source 1..20: mol_type = other RNA
actctagaacgagattgcct

SEQ ID NO: 10328 - RNA, 20 nt, synthetic construct
  source 1..20: mol_type = other RNA
gtgaggtgggcgttgagccc

SEQ ID NO: 10329 - RNA, 20 nt, synthetic construct
  source 1..20: mol_type = other RNA
gcataagtaagtggtgaggt

SEQ ID NO: 10330 - RNA, 20 nt, synthetic construct
  source 1..20: mol_type = other RNA
tgcataagtaagtggtgagg

SEQ ID NO: 10331 - RNA, 20 nt, synthetic construct
  source 1..20: mol_type = other RNA
gcttgcataagtaagtggtg

SEQ ID NO: 10332 - RNA, 20 nt, synthetic construct
  source 1..20: mol_type = other RNA
aactagcttgcataagtaag

SEQ ID NO: 10333 - RNA, 20 nt, synthetic construct
  source 1..20: mol_type = other RNA
ttttacaaatgaggagactg

SEQ ID NO: 10334 - RNA, 20 nt, synthetic construct
  source 1..20: mol_type = other RNA
ttatgcccattttacaaatg

SEQ ID NO: 10335 - RNA, 20 nt, synthetic construct
  source 1..20: mol_type = other RNA
cagtctcctcatttgtaaaa

SEQ ID NO: 10336 - RNA, 20 nt, synthetic construct
  source 1..20: mol_type = other RNA
agtctcctcatttgtaaaat

SEQ ID NO: 10337 - RNA, 20 nt, synthetic construct
  source 1..20: mol_type = other RNA
atcctataaagaaggtgctg

SEQ ID NO: 10338 - RNA, 20 nt, synthetic construct
  source 1..20: mol_type = other RNA
ttcacataatcctataaaga

SEQ ID NO: 10339 - RNA, 20 nt, synthetic construct
  source 1..20: mol_type = other RNA
aaccacagcaccttctttat

SEQ ID NO: 10340 - RNA, 20 nt, synthetic construct
  source 1..20: mol_type = other RNA
ttctttataggattatgtga

SEQ ID NO: 10341 - RNA, 20 nt, synthetic construct
  source 1..20: mol_type = other RNA
tataggattatgtgaaggtg

SEQ ID NO: 10342 - RNA, 20 nt, synthetic construct
  source 1..20: mol_type = other RNA
tgagctaatacgttaagaat

SEQ ID NO: 10343 - RNA, 20 nt, synthetic construct
  source 1..20: mol_type = other RNA
attggagctcaataacatgt

SEQ ID NO: 10344 - RNA, 20 nt, synthetic construct
  source 1..20: mol_type = other RNA
ctgtgtttcattcttgcctc

SEQ ID NO: 10345 - RNA, 20 nt, synthetic construct
  source 1..20: mol_type = other RNA
gtttcattcttgcctctggc

SEQ ID NO: 10346 - RNA, 20 nt, synthetic construct
  source 1..20: mol_type = other RNA
gggaagaacattccagccag

SEQ ID NO: 10347 - RNA, 20 nt, synthetic construct
  source 1..20: mol_type = other RNA
aatcagccatatggagagct

SEQ ID NO: 10348 - RNA, 20 nt, synthetic construct
  source 1..20: mol_type = other RNA
aaatcagccatatggagagc

SEQ ID NO: 10349 - RNA, 20 nt, synthetic construct
  source 1..20: mol_type = other RNA
gttcttcccagctctccata

SEQ ID NO: 10350 - RNA, 20 nt, synthetic construct
  source 1..20: mol_type = other RNA
aggatgagaaatcagccata

SEQ ID NO: 10351 - RNA, 20 nt, synthetic construct
  source 1..20: mol_type = other RNA
atggctgatttctcatcctt

SEQ ID NO: 10352 - RNA, 20 nt, synthetic construct
  source 1..20: mol_type = other RNA
tggctgatttctcatccttc

SEQ ID NO: 10353 - RNA, 20 nt, synthetic construct
  source 1..20: mol_type = other RNA
gagaatggggcaagtcccga

SEQ ID NO: 10354 - RNA, 20 nt, synthetic construct
  source 1..20: mol_type = other RNA
agtgatggggttggagaatg

SEQ ID NO: 10355 - RNA, 20 nt, synthetic construct
  source 1..20: mol_type = other RNA
tagtgatggggttggagaat

SEQ ID NO: 10356 - RNA, 20 nt, synthetic construct
  source 1..20: mol_type = other RNA
ctagtgatggggttggagaa

SEQ ID NO: 10357 - RNA, 20 nt, synthetic construct
  source 1..20: mol_type = other RNA
gataaaactagtgatggggt

SEQ ID NO: 10358 - RNA, 20 nt, synthetic construct
  source 1..20: mol_type = other RNA
aaaagataaaactagtgatg

SEQ ID NO: 10359 - RNA, 20 nt, synthetic construct
  source 1..20: mol_type = other RNA
aaaaagataaaactagtgat

SEQ ID NO: 10360 - RNA, 20 nt, synthetic construct
  source 1..20: mol_type = other RNA
gaaaaagataaaactagtga

SEQ ID NO: 10361 - RNA, 20 nt, synthetic construct
  source 1..20: mol_type = other RNA
atgcagtctgctcttgtcct

SEQ ID NO: 10362 - RNA, 20 nt, synthetic construct
  source 1..20: mol_type = other RNA
cctcctggagctcatgtcct

SEQ ID NO: 10363 - RNA, 20 nt, synthetic construct
  source 1..20: mol_type = other RNA
tgtcctaggacatgagctcc

SEQ ID NO: 10364 - RNA, 20 nt, synthetic construct
  source 1..20: mol_type = other RNA
cctaggacatgagctccagg

SEQ ID NO: 10365 - RNA, 20 nt, synthetic construct
  source 1..20: mol_type = other RNA
ctaggacatgagctccagga

SEQ ID NO: 10366 - RNA, 20 nt, synthetic construct
  source 1..20: mol_type = other RNA
ggacatgagctccaggaggg

SEQ ID NO: 10367 - RNA, 20 nt, synthetic construct
  source 1..20: mol_type = other RNA
cgagatgtttcccgccctcc

SEQ ID NO: 10368 - RNA, 20 nt, synthetic construct
  source 1..20: mol_type = other RNA
gacatgagctccaggagggc

SEQ ID NO: 10369 - RNA, 20 nt, synthetic construct
  source 1..20: mol_type = other RNA
ggcgccttgctgggtacaga

SEQ ID NO: 10370 - RNA, 20 nt, synthetic construct
  source 1..20: mol_type = other RNA
aggcgccttgctgggtacag

SEQ ID NO: 10371 - RNA, 20 nt, synthetic construct
  source 1..20: mol_type = other RNA
tgtgccctctgtacccagca

SEQ ID NO: 10372 - RNA, 20 nt, synthetic construct
  source 1..20: mol_type = other RNA
ttatacacaggcgccttgct

SEQ ID NO: 10373 - RNA, 20 nt, synthetic construct
  source 1..20: mol_type = other RNA
attatacacaggcgccttgc

SEQ ID NO: 10374 - RNA, 20 nt, synthetic construct
  source 1..20: mol_type = other RNA
attgagcacctattatacac

SEQ ID NO: 10375 - RNA, 20 nt, synthetic construct
  source 1..20: mol_type = other RNA
gcaaggcgcctgtgtataat

SEQ ID NO: 10376 - RNA, 20 nt, synthetic construct
  source 1..20: mol_type = other RNA
atgaatgaaaccgttaggtg

SEQ ID NO: 10377 - RNA, 20 nt, synthetic construct
  source 1..20: mol_type = other RNA
aacaaataatcctcacctaa

SEQ ID NO: 10378 - RNA, 20 nt, synthetic construct
  source 1..20: mol_type = other RNA
gcagaatgaatgaaaccgtt

SEQ ID NO: 10379 - RNA, 20 nt, synthetic construct
  source 1..20: mol_type = other RNA
tgaataagatgttcctgccc

SEQ ID NO: 10380 - RNA, 20 nt, synthetic construct
  source 1..20: mol_type = other RNA
aatataagactcaccagggc

SEQ ID NO: 10381 - RNA, 20 nt, synthetic construct
  source 1..20: mol_type = other RNA
ctaaaatataagactcacca

SEQ ID NO: 10382 - RNA, 20 nt, synthetic construct
  source 1..20: mol_type = other RNA
gctaaaatataagactcacc

SEQ ID NO: 10383 - RNA, 20 nt, synthetic construct
  source 1..20: mol_type = other RNA
agcaaattaaaaaaactctt

SEQ ID NO: 10384 - RNA, 20 nt, synthetic construct
  source 1..20: mol_type = other RNA
attaaaaaaactctttggac

SEQ ID NO: 10385 - RNA, 20 nt, synthetic construct
  source 1..20: mol_type = other RNA
ttaaaaaaactctttggaca

SEQ ID NO: 10386 - RNA, 20 nt, synthetic construct
  source 1..20: mol_type = other RNA
actctttggacagggctgcc

SEQ ID NO: 10387 - RNA, 20 nt, synthetic construct
  source 1..20: mol_type = other RNA
ttggacagggctgccaggtg

SEQ ID NO: 10388 - RNA, 20 nt, synthetic construct
  source 1..20: mol_type = other RNA
acagactggccaacctcacc

SEQ ID NO: 10389 - RNA, 20 nt, synthetic construct
  source 1..20: mol_type = other RNA
acagggctgccaggtgaggt

SEQ ID NO: 10390 - RNA, 20 nt, synthetic construct
  source 1..20: mol_type = other RNA
cctttgtgcagtgtacagac

SEQ ID NO: 10391 - RNA, 20 nt, synthetic construct
  source 1..20: mol_type = other RNA
ccagtctgtacactgcacaa

SEQ ID NO: 10392 - RNA, 20 nt, synthetic construct
  source 1..20: mol_type = other RNA
gtacactgcacaaaggcacc

SEQ ID NO: 10393 - RNA, 20 nt, synthetic construct
  source 1..20: mol_type = other RNA
tacactgcacaaaggcacct

SEQ ID NO: 10394 - RNA, 20 nt, synthetic construct
  source 1..20: mol_type = other RNA
gcacaaaggcacctgggaca

SEQ ID NO: 10395 - RNA, 20 nt, synthetic construct
  source 1..20: mol_type = other RNA
cccatgttcccccttgtccc

SEQ ID NO: 10396 - RNA, 20 nt, synthetic construct
  source 1..20: mol_type = other RNA
cacaaaggcacctgggacaa

SEQ ID NO: 10397 - RNA, 20 nt, synthetic construct
  source 1..20: mol_type = other RNA
acaaaggcacctgggacaag

SEQ ID NO: 10398 - RNA, 20 nt, synthetic construct
  source 1..20: mol_type = other RNA
caaaggcacctgggacaagg

SEQ ID NO: 10399 - RNA, 20 nt, synthetic construct
  source 1..20: mol_type = other RNA
acctgggacaagggggaaca

SEQ ID NO: 10400 - RNA, 20 nt, synthetic construct
  source 1..20: mol_type = other RNA
cctgggacaagggggaacat

SEQ ID NO: 10401 - RNA, 20 nt, synthetic construct
  source 1..20: mol_type = other RNA
ctgggacaagggggaacatg

SEQ ID NO: 10402 - RNA, 20 nt, synthetic construct
  source 1..20: mol_type = other RNA
tgggacaagggggaacatgg

SEQ ID NO: 10403 - RNA, 20 nt, synthetic construct
  source 1..20: mol_type = other RNA
atgggggctgcaaaccagtc

SEQ ID NO: 10404 - RNA, 20 nt, synthetic construct
  source 1..20: mol_type = other RNA
tgggggctgcaaaccagtct

SEQ ID NO: 10405 - RNA, 20 nt, synthetic construct
  source 1..20: mol_type = other RNA
ttggcaagcagaacccagac

SEQ ID NO: 10406 - RNA, 20 nt, synthetic construct
  source 1..20: mol_type = other RNA
ctgggttctgcttgccaaac

SEQ ID NO: 10407 - RNA, 20 nt, synthetic construct
  source 1..20: mol_type = other RNA
tgggttctgcttgccaaact

SEQ ID NO: 10408 - RNA, 20 nt, synthetic construct
  source 1..20: mol_type = other RNA
ccacaccaggactcccagtt

SEQ ID NO: 10409 - RNA, 20 nt, synthetic construct
  source 1..20: mol_type = other RNA
gcttgccaaactgggagtcc

SEQ ID NO: 10410 - RNA, 20 nt, synthetic construct
  source 1..20: mol_type = other RNA
ccaaactgggagtcctggtg

SEQ ID NO: 10411 - RNA, 20 nt, synthetic construct
  source 1..20: mol_type = other RNA
gggttaaaaggctccacacc

SEQ ID NO: 10412 - RNA, 20 nt, synthetic construct
  source 1..20: mol_type = other RNA
agatgcccctctgggttaaa

SEQ ID NO: 10413 - RNA, 20 nt, synthetic construct
  source 1..20: mol_type = other RNA
tgtggagccttttaacccag

SEQ ID NO: 10414 - RNA, 20 nt, synthetic construct
  source 1..20: mol_type = other RNA
gtggagccttttaacccaga

SEQ ID NO: 10415 - RNA, 20 nt, synthetic construct
  source 1..20: mol_type = other RNA
tggagccttttaacccagag

SEQ ID NO: 10416 - RNA, 20 nt, synthetic construct
  source 1..20: mol_type = other RNA
ctacgaaaagatgcccctct

SEQ ID NO: 10417 - RNA, 20 nt, synthetic construct
  source 1..20: mol_type = other RNA
actacgaaaagatgcccctc

SEQ ID NO: 10418 - RNA, 20 nt, synthetic construct
  source 1..20: mol_type = other RNA
cgcacagtcatcgtaagatg

SEQ ID NO: 10419 - RNA, 20 nt, synthetic construct
  source 1..20: mol_type = other RNA
tatcacttagatctgtgaca

SEQ ID NO: 10420 - RNA, 20 nt, synthetic construct
  source 1..20: mol_type = other RNA
ttatagtcacactcctataa

SEQ ID NO: 10421 - RNA, 20 nt, synthetic construct
  source 1..20: mol_type = other RNA
tcagaagtccattcctttat

SEQ ID NO: 10422 - RNA, 20 nt, synthetic construct
  source 1..20: mol_type = other RNA
gtcacactcctataaaggaa

SEQ ID NO: 10423 - RNA, 20 nt, synthetic construct
  source 1..20: mol_type = other RNA
gaatggacttctgacttctt

SEQ ID NO: 10424 - RNA, 20 nt, synthetic construct
  source 1..20: mol_type = other RNA
tggacttctgacttctttgg

SEQ ID NO: 10425 - RNA, 20 nt, synthetic construct
  source 1..20: mol_type = other RNA
tctttggaggacctctctgc

SEQ ID NO: 10426 - RNA, 20 nt, synthetic construct
  source 1..20: mol_type = other RNA
ctgtgcctgtccctgcagag

SEQ ID NO: 10427 - RNA, 20 nt, synthetic construct
  source 1..20: mol_type = other RNA
ctttggaggacctctctgca

SEQ ID NO: 10428 - RNA, 20 nt, synthetic construct
  source 1..20: mol_type = other RNA
gaggacctctctgcagggac

SEQ ID NO: 10429 - RNA, 20 nt, synthetic construct
  source 1..20: mol_type = other RNA
cagggacaggcacagtgtgc

SEQ ID NO: 10430 - RNA, 20 nt, synthetic construct
  source 1..20: mol_type = other RNA
atggggttcaggggcacttc

SEQ ID NO: 10431 - RNA, 20 nt, synthetic construct
  source 1..20: mol_type = other RNA
acctgacaaatggggttcag

SEQ ID NO: 10432 - RNA, 20 nt, synthetic construct
  source 1..20: mol_type = other RNA
cacctgacaaatggggttca

SEQ ID NO: 10433 - RNA, 20 nt, synthetic construct
  source 1..20: mol_type = other RNA
ccacctgacaaatggggttc

SEQ ID NO: 10434 - RNA, 20 nt, synthetic construct
  source 1..20: mol_type = other RNA
gctttaccacctgacaaatg

SEQ ID NO: 10435 - RNA, 20 nt, synthetic construct
  source 1..20: mol_type = other RNA
cgctttaccacctgacaaat

SEQ ID NO: 10436 - RNA, 20 nt, synthetic construct
  source 1..20: mol_type = other RNA
gcccctgaaccccatttgtc

SEQ ID NO: 10437 - RNA, 20 nt, synthetic construct
  source 1..20: mol_type = other RNA
gcgctttaccacctgacaaa

SEQ ID NO: 10438 - RNA, 20 nt, synthetic construct
  source 1..20: mol_type = other RNA
cctgaaccccatttgtcagg

SEQ ID NO: 10439 - RNA, 20 nt, synthetic construct
  source 1..20: mol_type = other RNA
tcaggtggtaaagcgctgct

SEQ ID NO: 10440 - RNA, 20 nt, synthetic construct
  source 1..20: mol_type = other RNA
ggtggtaaagcgctgctcgg

SEQ ID NO: 10441 - RNA, 20 nt, synthetic construct
  source 1..20: mol_type = other RNA
aagcgctgctcggaggaatc

SEQ ID NO: 10442 - RNA, 20 nt, synthetic construct
  source 1..20: mol_type = other RNA
agcgctgctcggaggaatca

SEQ ID NO: 10443 - RNA, 20 nt, synthetic construct
  source 1..20: mol_type = other RNA
gacttacaatccactggaca

SEQ ID NO: 10444 - RNA, 20 nt, synthetic construct
  source 1..20: mol_type = other RNA
tagtgcaattccatgtccag

SEQ ID NO: 10445 - RNA, 20 nt, synthetic construct
  source 1..20: mol_type = other RNA
tgcgtggacttacaatccac

SEQ ID NO: 10446 - RNA, 20 nt, synthetic construct
  source 1..20: mol_type = other RNA
gtgaccatttggaaggtgcg

SEQ ID NO: 10447 - RNA, 20 nt, synthetic construct
  source 1..20: mol_type = other RNA
aagtccacgcaccttccaaa

SEQ ID NO: 10448 - RNA, 20 nt, synthetic construct
  source 1..20: mol_type = other RNA
aggaagagtgaccatttgga

SEQ ID NO: 10449 - RNA, 20 nt, synthetic construct
  source 1..20: mol_type = other RNA
tgcgaggaagagtgaccatt

SEQ ID NO: 10450 - RNA, 20 nt, synthetic construct
  source 1..20: mol_type = other RNA
aaatggtcactcttcctcgc

SEQ ID NO: 10451 - RNA, 20 nt, synthetic construct
  source 1..20: mol_type = other RNA
tatgcagagagaggcctgcg

SEQ ID NO: 10452 - RNA, 20 nt, synthetic construct
  source 1..20: mol_type = other RNA
agacatttgtatgcagagag

SEQ ID NO: 10453 - RNA, 20 nt, synthetic construct
  source 1..20: mol_type = other RNA
gaaaaaggtgagcgtcagga

SEQ ID NO: 10454 - RNA, 20 nt, synthetic construct
  source 1..20: mol_type = other RNA
ggaaaaaggtgagcgtcagg

SEQ ID NO: 10455 - RNA, 20 nt, synthetic construct
  source 1..20: mol_type = other RNA
cagggaaaaaggtgagcgtc

SEQ ID NO: 10456 - RNA, 20 nt, synthetic construct
  source 1..20: mol_type = other RNA
tttgagagccccagggaaaa

SEQ ID NO: 10457 - RNA, 20 nt, synthetic construct
  source 1..20: mol_type = other RNA
ctgacgctcacctttttccc

SEQ ID NO: 10458 - RNA, 20 nt, synthetic construct
  source 1..20: mol_type = other RNA
tgacgctcacctttttccct

SEQ ID NO: 10459 - RNA, 20 nt, synthetic construct
  source 1..20: mol_type = other RNA
gacgctcacctttttccctg

SEQ ID NO: 10460 - RNA, 20 nt, synthetic construct
  source 1..20: mol_type = other RNA
gaagacatttgagagcccca

SEQ ID NO: 10461 - RNA, 20 nt, synthetic construct
  source 1..20: mol_type = other RNA
agaagacatttgagagcccc

SEQ ID NO: 10462 - RNA, 20 nt, synthetic construct
  source 1..20: mol_type = other RNA
tctttctttagcatcacttg

SEQ ID NO: 10463 - RNA, 20 nt, synthetic construct
  source 1..20: mol_type = other RNA
ctttctttagcatcacttga

SEQ ID NO: 10464 - RNA, 20 nt, synthetic construct
  source 1..20: mol_type = other RNA
tagcatcacttgagggcaag

SEQ ID NO: 10465 - RNA, 20 nt, synthetic construct
  source 1..20: mol_type = other RNA
gaactctggggggagacagt

SEQ ID NO: 10466 - RNA, 20 nt, synthetic construct
  source 1..20: mol_type = other RNA
acaggcggcagaactctggg

SEQ ID NO: 10467 - RNA, 20 nt, synthetic construct
  source 1..20: mol_type = other RNA
tacaggcggcagaactctgg

SEQ ID NO: 10468 - RNA, 20 nt, synthetic construct
  source 1..20: mol_type = other RNA
gtacaggcggcagaactctg

SEQ ID NO: 10469 - RNA, 20 nt, synthetic construct
  source 1..20: mol_type = other RNA
agtacaggcggcagaactct

SEQ ID NO: 10470 - RNA, 20 nt, synthetic construct
  source 1..20: mol_type = other RNA
gagtacaggcggcagaactc

SEQ ID NO: 10471 - RNA, 20 nt, synthetic construct
  source 1..20: mol_type = other RNA
gaggtgtgggagagtacagg

SEQ ID NO: 10472 - RNA, 20 nt, synthetic construct
  source 1..20: mol_type = other RNA
actgaggtgtgggagagtac

SEQ ID NO: 10473 - RNA, 20 nt, synthetic construct
  source 1..20: mol_type = other RNA
aggcgaggagactgaggtgt

SEQ ID NO: 10474 - RNA, 20 nt, synthetic construct
  source 1..20: mol_type = other RNA
caggcgaggagactgaggtg

SEQ ID NO: 10475 - RNA, 20 nt, synthetic construct
  source 1..20: mol_type = other RNA
ttctacaggcgaggagactg

SEQ ID NO: 10476 - RNA, 20 nt, synthetic construct
  source 1..20: mol_type = other RNA
ttgacccctttctacaggcg

SEQ ID NO: 10477 - RNA, 20 nt, synthetic construct
  source 1..20: mol_type = other RNA
cagtctcctcgcctgtagaa

SEQ ID NO: 10478 - RNA, 20 nt, synthetic construct
  source 1..20: mol_type = other RNA
aacgattgacccctttctac

SEQ ID NO: 10479 - RNA, 20 nt, synthetic construct
  source 1..20: mol_type = other RNA
agtctcctcgcctgtagaaa

SEQ ID NO: 10480 - RNA, 20 nt, synthetic construct
  source 1..20: mol_type = other RNA
gtctcctcgcctgtagaaag

SEQ ID NO: 10481 - RNA, 20 nt, synthetic construct
  source 1..20: mol_type = other RNA
catacacaccaagtgaagca

SEQ ID NO: 10482 - RNA, 20 nt, synthetic construct
  source 1..20: mol_type = other RNA
acatacacaccaagtgaagc

SEQ ID NO: 10483 - RNA, 20 nt, synthetic construct
  source 1..20: mol_type = other RNA
cgtttgaaccctgcttcact

SEQ ID NO: 10484 - RNA, 20 nt, synthetic construct
  source 1..20: mol_type = other RNA
ttcacttggtgtgtatgtga

SEQ ID NO: 10485 - RNA, 20 nt, synthetic construct
  source 1..20: mol_type = other RNA
aaatcaagtgctctgcaaac

SEQ ID NO: 10486 - RNA, 20 nt, synthetic construct
  source 1..20: mol_type = other RNA
attgggagcttgtagtttca

SEQ ID NO: 10487 - RNA, 20 nt, synthetic construct
  source 1..20: mol_type = other RNA
gggattaaatgagtggaatt

SEQ ID NO: 10488 - RNA, 20 nt, synthetic construct
  source 1..20: mol_type = other RNA
agggattaaatgagtggaat

SEQ ID NO: 10489 - RNA, 20 nt, synthetic construct
  source 1..20: mol_type = other RNA
caagagagggattaaatgag

SEQ ID NO: 10490 - RNA, 20 nt, synthetic construct
  source 1..20: mol_type = other RNA
ctgggcaacagagcaagaga

SEQ ID NO: 10491 - RNA, 20 nt, synthetic construct
  source 1..20: mol_type = other RNA
cctgggcaacagagcaagag

SEQ ID NO: 10492 - RNA, 20 nt, synthetic construct
  source 1..20: mol_type = other RNA
cctctcttgctctgttgccc

SEQ ID NO: 10493 - RNA, 20 nt, synthetic construct
  source 1..20: mol_type = other RNA
tcttgctctgttgcccaggc

SEQ ID NO: 10494 - RNA, 20 nt, synthetic construct
  source 1..20: mol_type = other RNA
atgccactgcattccagcct

SEQ ID NO: 10495 - RNA, 20 nt, synthetic construct
  source 1..20: mol_type = other RNA
catgccactgcattccagcc

SEQ ID NO: 10496 - RNA, 20 nt, synthetic construct
  source 1..20: mol_type = other RNA
ttgcccaggctggaatgcag

SEQ ID NO: 10497 - RNA, 20 nt, synthetic construct
  source 1..20: mol_type = other RNA
gcttgaaaccagggaggcag

SEQ ID NO: 10498 - RNA, 20 nt, synthetic construct
  source 1..20: mol_type = other RNA
cactgcaacctctgcctccc

SEQ ID NO: 10499 - RNA, 20 nt, synthetic construct
  source 1..20: mol_type = other RNA
agaattgcttgaaaccaggg

SEQ ID NO: 10500 - RNA, 20 nt, synthetic construct
  source 1..20: mol_type = other RNA
aggagaattgcttgaaacca

SEQ ID NO: 10501 - RNA, 20 nt, synthetic construct
  source 1..20: mol_type = other RNA
caggagaattgcttgaaacc

SEQ ID NO: 10502 - RNA, 20 nt, synthetic construct
  source 1..20: mol_type = other RNA
gctactcgggaggctgaggc

SEQ ID NO: 10503 - RNA, 20 nt, synthetic construct
  source 1..20: mol_type = other RNA
cccagctactcgggaggctg

SEQ ID NO: 10504 - RNA, 20 nt, synthetic construct
  source 1..20: mol_type = other RNA
tatagtcccagctactcggg

SEQ ID NO: 10505 - RNA, 20 nt, synthetic construct
  source 1..20: mol_type = other RNA
acttatagtcccagctactc

SEQ ID NO: 10506 - RNA, 20 nt, synthetic construct
  source 1..20: mol_type = other RNA
gcctcagcctcccgagtagc

SEQ ID NO: 10507 - RNA, 20 nt, synthetic construct
  source 1..20: mol_type = other RNA
cacttatagtcccagctact

SEQ ID NO: 10508 - RNA, 20 nt, synthetic construct
  source 1..20: mol_type = other RNA
cctcagcctcccgagtagct

SEQ ID NO: 10509 - RNA, 20 nt, synthetic construct
  source 1..20: mol_type = other RNA
aaaaaattagccaggcatag

SEQ ID NO: 10510 - RNA, 20 nt, synthetic construct
  source 1..20: mol_type = other RNA
taagtgtgcgccactatgcc

SEQ ID NO: 10511 - RNA, 20 nt, synthetic construct
  source 1..20: mol_type = other RNA
aaaatacaaaaaaattagcc

SEQ ID NO: 10512 - RNA, 20 nt, synthetic construct
  source 1..20: mol_type = other RNA
ttttgtatttttagtagaga

SEQ ID NO: 10513 - RNA, 20 nt, synthetic construct
  source 1..20: mol_type = other RNA
tttgtatttttagtagagat

SEQ ID NO: 10514 - RNA, 20 nt, synthetic construct
  source 1..20: mol_type = other RNA
ttgtatttttagtagagatg

SEQ ID NO: 10515 - RNA, 20 nt, synthetic construct
  source 1..20: mol_type = other RNA
gtagagatggggtttcaccg

SEQ ID NO: 10516 - RNA, 20 nt, synthetic construct
  source 1..20: mol_type = other RNA
gagatggggtttcaccgtgg

SEQ ID NO: 10517 - RNA, 20 nt, synthetic construct
  source 1..20: mol_type = other RNA
cgagaccagcctggccacca

SEQ ID NO: 10518 - RNA, 20 nt, synthetic construct
  source 1..20: mol_type = other RNA
ggggtttcaccgtggtggcc

SEQ ID NO: 10519 - RNA, 20 nt, synthetic construct
  source 1..20: mol_type = other RNA
tttcaccgtggtggccaggc

SEQ ID NO: 10520 - RNA, 20 nt, synthetic construct
  source 1..20: mol_type = other RNA
ttaggagttcgagaccagcc

SEQ ID NO: 10521 - RNA, 20 nt, synthetic construct
  source 1..20: mol_type = other RNA
cgggcagatcacttgaggtt

SEQ ID NO: 10522 - RNA, 20 nt, synthetic construct
  source 1..20: mol_type = other RNA
cgaggcgggcagatcacttg

SEQ ID NO: 10523 - RNA, 20 nt, synthetic construct
  source 1..20: mol_type = other RNA
ctcaagtgatctgcccgcct

SEQ ID NO: 10524 - RNA, 20 nt, synthetic construct
  source 1..20: mol_type = other RNA
gcactttggaaggccgaggc

SEQ ID NO: 10525 - RNA, 20 nt, synthetic construct
  source 1..20: mol_type = other RNA
agcactttggaaggccgagg

SEQ ID NO: 10526 - RNA, 20 nt, synthetic construct
  source 1..20: mol_type = other RNA
cccagcactttggaaggccg

SEQ ID NO: 10527 - RNA, 20 nt, synthetic construct
  source 1..20: mol_type = other RNA
tgtaatcccagcactttgga

SEQ ID NO: 10528 - RNA, 20 nt, synthetic construct
  source 1..20: mol_type = other RNA
gcctcggccttccaaagtgc

SEQ ID NO: 10529 - RNA, 20 nt, synthetic construct
  source 1..20: mol_type = other RNA
tgcctgtaatcccagcactt

SEQ ID NO: 10530 - RNA, 20 nt, synthetic construct
  source 1..20: mol_type = other RNA
cctcggccttccaaagtgct

SEQ ID NO: 10531 - RNA, 20 nt, synthetic construct
  source 1..20: mol_type = other RNA
ttccaaagtgctgggattac

SEQ ID NO: 10532 - RNA, 20 nt, synthetic construct
  source 1..20: mol_type = other RNA
gggggaagggcttggcatgg

SEQ ID NO: 10533 - RNA, 20 nt, synthetic construct
  source 1..20: mol_type = other RNA
taggggggaagggcttggca

SEQ ID NO: 10534 - RNA, 20 nt, synthetic construct
  source 1..20: mol_type = other RNA
aaagataggggggaagggct

SEQ ID NO: 10535 - RNA, 20 nt, synthetic construct
  source 1..20: mol_type = other RNA
tcattaaagataggggggaa

SEQ ID NO: 10536 - RNA, 20 nt, synthetic construct
  source 1..20: mol_type = other RNA
ttcattaaagatagggggga

SEQ ID NO: 10537 - RNA, 20 nt, synthetic construct
  source 1..20: mol_type = other RNA
gaccttcattaaagataggg

SEQ ID NO: 10538 - RNA, 20 nt, synthetic construct
  source 1..20: mol_type = other RNA
agaccttcattaaagatagg

SEQ ID NO: 10539 - RNA, 20 nt, synthetic construct
  source 1..20: mol_type = other RNA
tagaccttcattaaagatag

SEQ ID NO: 10540 - RNA, 20 nt, synthetic construct
  source 1..20: mol_type = other RNA
gtagaccttcattaaagata

SEQ ID NO: 10541 - RNA, 20 nt, synthetic construct
  source 1..20: mol_type = other RNA
ggtagaccttcattaaagat

SEQ ID NO: 10542 - RNA, 20 nt, synthetic construct
  source 1..20: mol_type = other RNA
ttcccccctatctttaatga

SEQ ID NO: 10543 - RNA, 20 nt, synthetic construct
  source 1..20: mol_type = other RNA
tatcccctgtgtcaggcaca

SEQ ID NO: 10544 - RNA, 20 nt, synthetic construct
  source 1..20: mol_type = other RNA
gtctaccatgtgcctgacac

SEQ ID NO: 10545 - RNA, 20 nt, synthetic construct
  source 1..20: mol_type = other RNA
tctaccatgtgcctgacaca

SEQ ID NO: 10546 - RNA, 20 nt, synthetic construct
  source 1..20: mol_type = other RNA
gggtgggtatcccctgtgtc

SEQ ID NO: 10547 - RNA, 20 nt, synthetic construct
  source 1..20: mol_type = other RNA
ctaccatgtgcctgacacag

SEQ ID NO: 10548 - RNA, 20 nt, synthetic construct
  source 1..20: mol_type = other RNA
aatcccatagaagtgggggt

SEQ ID NO: 10549 - RNA, 20 nt, synthetic construct
  source 1..20: mol_type = other RNA
gaatcccatagaagtggggg

SEQ ID NO: 10550 - RNA, 20 nt, synthetic construct
  source 1..20: mol_type = other RNA
cctgaatcccatagaagtgg

SEQ ID NO: 10551 - RNA, 20 nt, synthetic construct
  source 1..20: mol_type = other RNA
gcctgaatcccatagaagtg

SEQ ID NO: 10552 - RNA, 20 nt, synthetic construct
  source 1..20: mol_type = other RNA
ggcctgaatcccatagaagt

SEQ ID NO: 10553 - RNA, 20 nt, synthetic construct
  source 1..20: mol_type = other RNA
gatacccacccccacttcta

SEQ ID NO: 10554 - RNA, 20 nt, synthetic construct
  source 1..20: mol_type = other RNA
aggcctgaatcccatagaag

SEQ ID NO: 10555 - RNA, 20 nt, synthetic construct
  source 1..20: mol_type = other RNA
atacccacccccacttctat

SEQ ID NO: 10556 - RNA, 20 nt, synthetic construct
  source 1..20: mol_type = other RNA
cccccacttctatgggattc

SEQ ID NO: 10557 - RNA, 20 nt, synthetic construct
  source 1..20: mol_type = other RNA
acttctatgggattcaggcc

SEQ ID NO: 10558 - RNA, 20 nt, synthetic construct
  source 1..20: mol_type = other RNA
tgaaggccaagctggaaacc

SEQ ID NO: 10559 - RNA, 20 nt, synthetic construct
  source 1..20: mol_type = other RNA
ttcaggcctggtttccagct

SEQ ID NO: 10560 - RNA, 20 nt, synthetic construct
  source 1..20: mol_type = other RNA
gaaaagcctgaaggccaagc

SEQ ID NO: 10561 - RNA, 20 nt, synthetic construct
  source 1..20: mol_type = other RNA
tggtttccagcttggccttc

SEQ ID NO: 10562 - RNA, 20 nt, synthetic construct
  source 1..20: mol_type = other RNA
gtgtggtgggaaaagcctga

SEQ ID NO: 10563 - RNA, 20 nt, synthetic construct
  source 1..20: mol_type = other RNA
gacagcatttggggtgtggt

SEQ ID NO: 10564 - RNA, 20 nt, synthetic construct
  source 1..20: mol_type = other RNA
ggacagcatttggggtgtgg

SEQ ID NO: 10565 - RNA, 20 nt, synthetic construct
  source 1..20: mol_type = other RNA
cagggacagcatttggggtg

SEQ ID NO: 10566 - RNA, 20 nt, synthetic construct
  source 1..20: mol_type = other RNA
caagccagggacagcatttg

SEQ ID NO: 10567 - RNA, 20 nt, synthetic construct
  source 1..20: mol_type = other RNA
acaagccagggacagcattt

SEQ ID NO: 10568 - RNA, 20 nt, synthetic construct
  source 1..20: mol_type = other RNA
cacaagccagggacagcatt

SEQ ID NO: 10569 - RNA, 20 nt, synthetic construct
  source 1..20: mol_type = other RNA
cacaccccaaatgctgtccc

SEQ ID NO: 10570 - RNA, 20 nt, synthetic construct
  source 1..20: mol_type = other RNA
ctgccccactccacaagcca

SEQ ID NO: 10571 - RNA, 20 nt, synthetic construct
  source 1..20: mol_type = other RNA
caaatgctgtccctggcttg

SEQ ID NO: 10572 - RNA, 20 nt, synthetic construct
  source 1..20: mol_type = other RNA
cctgccccactccacaagcc

SEQ ID NO: 10573 - RNA, 20 nt, synthetic construct
  source 1..20: mol_type = other RNA
gctgtccctggcttgtggag

SEQ ID NO: 10574 - RNA, 20 nt, synthetic construct
  source 1..20: mol_type = other RNA
ctgtccctggcttgtggagt

SEQ ID NO: 10575 - RNA, 20 nt, synthetic construct
  source 1..20: mol_type = other RNA
tgtccctggcttgtggagtg

SEQ ID NO: 10576 - RNA, 20 nt, synthetic construct
  source 1..20: mol_type = other RNA
cctggcttgtggagtggggc

SEQ ID NO: 10577 - RNA, 20 nt, synthetic construct
  source 1..20: mol_type = other RNA
ctggcttgtggagtggggca

SEQ ID NO: 10578 - RNA, 20 nt, synthetic construct
  source 1..20: mol_type = other RNA
tggcttgtggagtggggcag

SEQ ID NO: 10579 - RNA, 20 nt, synthetic construct
  source 1..20: mol_type = other RNA
ggcttgtggagtggggcagg

SEQ ID NO: 10580 - RNA, 20 nt, synthetic construct
  source 1..20: mol_type = other RNA
agtggggcagggggccagcc

SEQ ID NO: 10581 - RNA, 20 nt, synthetic construct
  source 1..20: mol_type = other RNA
gtggggcagggggccagcct

SEQ ID NO: 10582 - RNA, 20 nt, synthetic construct
  source 1..20: mol_type = other RNA
ctggcgtgaaagtcccaggc

SEQ ID NO: 10583 - RNA, 20 nt, synthetic construct
  source 1..20: mol_type = other RNA
cgggctggcgtgaaagtccc

SEQ ID NO: 10584 - RNA, 20 nt, synthetic construct
  source 1..20: mol_type = other RNA
agagtctgccccagtcgggc

SEQ ID NO: 10585 - RNA, 20 nt, synthetic construct
  source 1..20: mol_type = other RNA
gactttcacgccagcccgac

SEQ ID NO: 10586 - RNA, 20 nt, synthetic construct
  source 1..20: mol_type = other RNA
actttcacgccagcccgact

SEQ ID NO: 10587 - RNA, 20 nt, synthetic construct
  source 1..20: mol_type = other RNA
ctttcacgccagcccgactg

SEQ ID NO: 10588 - RNA, 20 nt, synthetic construct
  source 1..20: mol_type = other RNA
tgagagagtctgccccagtc

SEQ ID NO: 10589 - RNA, 20 nt, synthetic construct
  source 1..20: mol_type = other RNA
ttgagagagtctgccccagt

SEQ ID NO: 10590 - RNA, 20 nt, synthetic construct
  source 1..20: mol_type = other RNA
gcagactctctcaaccccac

SEQ ID NO: 10591 - RNA, 20 nt, synthetic construct
  source 1..20: mol_type = other RNA
aaacagcagaagatccagtg

SEQ ID NO: 10592 - RNA, 20 nt, synthetic construct
  source 1..20: mol_type = other RNA
caaacagcagaagatccagt

SEQ ID NO: 10593 - RNA, 20 nt, synthetic construct
  source 1..20: mol_type = other RNA
acaaacagcagaagatccag

SEQ ID NO: 10594 - RNA, 20 nt, synthetic construct
  source 1..20: mol_type = other RNA
tctgctgtttgtcagccaca

SEQ ID NO: 10595 - RNA, 20 nt, synthetic construct
  source 1..20: mol_type = other RNA
gagttctaggcagaaccttg

SEQ ID NO: 10596 - RNA, 20 nt, synthetic construct
  source 1..20: mol_type = other RNA
agattcgggaaaggagttct

SEQ ID NO: 10597 - RNA, 20 nt, synthetic construct
  source 1..20: mol_type = other RNA
ttaactttgagattcgggaa

SEQ ID NO: 10598 - RNA, 20 nt, synthetic construct
  source 1..20: mol_type = other RNA
tttttttaactttgagattc

SEQ ID NO: 10599 - RNA, 20 nt, synthetic construct
  source 1..20: mol_type = other RNA
ttttttttaactttgagatt

SEQ ID NO: 10600 - RNA, 20 nt, synthetic construct
  source 1..20: mol_type = other RNA
aatctcaaagttaaaaaaaa

SEQ ID NO: 10601 - RNA, 20 nt, synthetic construct
  source 1..20: mol_type = other RNA
tcaaagttaaaaaaaaaggc

SEQ ID NO: 10602 - RNA, 20 nt, synthetic construct
  source 1..20: mol_type = other RNA
caaagttaaaaaaaaaggca

SEQ ID NO: 10603 - RNA, 20 nt, synthetic construct
  source 1..20: mol_type = other RNA
aaaaaaaaaggcagggcccc

SEQ ID NO: 10604 - RNA, 20 nt, synthetic construct
  source 1..20: mol_type = other RNA
aaaaaaaaggcagggcccca

SEQ ID NO: 10605 - RNA, 20 nt, synthetic construct
  source 1..20: mol_type = other RNA
aaaaaaaggcagggccccag

SEQ ID NO: 10606 - RNA, 20 nt, synthetic construct
  source 1..20: mol_type = other RNA
gtatgcaactccaacccctg

SEQ ID NO: 10607 - RNA, 20 nt, synthetic construct
  source 1..20: mol_type = other RNA
aaaggcagggccccaggggt

SEQ ID NO: 10608 - RNA, 20 nt, synthetic construct
  source 1..20: mol_type = other RNA
tgtatgcaactccaacccct

SEQ ID NO: 10609 - RNA, 20 nt, synthetic construct
  source 1..20: mol_type = other RNA
atgtatgcaactccaacccc

SEQ ID NO: 10610 - RNA, 20 nt, synthetic construct
  source 1..20: mol_type = other RNA
acttaggaggcttacttctt

SEQ ID NO: 10611 - RNA, 20 nt, synthetic construct
  source 1..20: mol_type = other RNA
ctgtctaagcaatacttagg

SEQ ID NO: 10612 - RNA, 20 nt, synthetic construct
  source 1..20: mol_type = other RNA
aacctgtctaagcaatactt

SEQ ID NO: 10613 - RNA, 20 nt, synthetic construct
  source 1..20: mol_type = other RNA
ctcctaagtattgcttagac

SEQ ID NO: 10614 - RNA, 20 nt, synthetic construct
  source 1..20: mol_type = other RNA
caggtttatcagaattaagt

SEQ ID NO: 10615 - RNA, 20 nt, synthetic construct
  source 1..20: mol_type = other RNA
tcagaaaagcatttccagcc

SEQ ID NO: 10616 - RNA, 20 nt, synthetic construct
  source 1..20: mol_type = other RNA
cagaaaagcatttccagcca

SEQ ID NO: 10617 - RNA, 20 nt, synthetic construct
  source 1..20: mol_type = other RNA
agaaaagcatttccagccag

SEQ ID NO: 10618 - RNA, 20 nt, synthetic construct
  source 1..20: mol_type = other RNA
tgccacgttactcccctggc

SEQ ID NO: 10619 - RNA, 20 nt, synthetic construct
  source 1..20: mol_type = other RNA
tgagtgccacgttactcccc

SEQ ID NO: 10620 - RNA, 20 nt, synthetic construct
  source 1..20: mol_type = other RNA
ttccagccaggggagtaacg

SEQ ID NO: 10621 - RNA, 20 nt, synthetic construct
  source 1..20: mol_type = other RNA
tggcaaaacagacatcatgc

SEQ ID NO: 10622 - RNA, 20 nt, synthetic construct
  source 1..20: mol_type = other RNA
ttactcgttcttcagcaagt

SEQ ID NO: 10623 - RNA, 20 nt, synthetic construct
  source 1..20: mol_type = other RNA
gattctcgctccttcatttc

SEQ ID NO: 10624 - RNA, 20 nt, synthetic construct
  source 1..20: mol_type = other RNA
gaacgagtaacctgaaatga

SEQ ID NO: 10625 - RNA, 20 nt, synthetic construct
  source 1..20: mol_type = other RNA
gctgttggggggctgagggt

SEQ ID NO: 10626 - RNA, 20 nt, synthetic construct
  source 1..20: mol_type = other RNA
agctgttggggggctgaggg

SEQ ID NO: 10627 - RNA, 20 nt, synthetic construct
  source 1..20: mol_type = other RNA
ggaagctgttggggggctga

SEQ ID NO: 10628 - RNA, 20 nt, synthetic construct
  source 1..20: mol_type = other RNA
aggaagctgttggggggctg

SEQ ID NO: 10629 - RNA, 20 nt, synthetic construct
  source 1..20: mol_type = other RNA
aagctgaggaagctgttggg

SEQ ID NO: 10630 - RNA, 20 nt, synthetic construct
  source 1..20: mol_type = other RNA
gaagctgaggaagctgttgg

SEQ ID NO: 10631 - RNA, 20 nt, synthetic construct
  source 1..20: mol_type = other RNA
agaagctgaggaagctgttg

SEQ ID NO: 10632 - RNA, 20 nt, synthetic construct
  source 1..20: mol_type = other RNA
aagaagctgaggaagctgtt

SEQ ID NO: 10633 - RNA, 20 nt, synthetic construct
  source 1..20: mol_type = other RNA
aaagaagctgaggaagctgt

SEQ ID NO: 10634 - RNA, 20 nt, synthetic construct
  source 1..20: mol_type = other RNA
ctcagaagaaaaagaagctg

SEQ ID NO: 10635 - RNA, 20 nt, synthetic construct
  source 1..20: mol_type = other RNA
agatgcagcgactgtttcag

SEQ ID NO: 10636 - RNA, 20 nt, synthetic construct
  source 1..20: mol_type = other RNA
tagatgcagcgactgtttca

SEQ ID NO: 10637 - RNA, 20 nt, synthetic construct
  source 1..20: mol_type = other RNA
ttagatgcagcgactgtttc

SEQ ID NO: 10638 - RNA, 20 nt, synthetic construct
  source 1..20: mol_type = other RNA
gctgcatctaagaccagcct

SEQ ID NO: 10639 - RNA, 20 nt, synthetic construct
  source 1..20: mol_type = other RNA
ctgcatctaagaccagcctc

SEQ ID NO: 10640 - RNA, 20 nt, synthetic construct
  source 1..20: mol_type = other RNA
agctgggtttagcccgaggc

SEQ ID NO: 10641 - RNA, 20 nt, synthetic construct
  source 1..20: mol_type = other RNA
ggccagctgggtttagcccg

SEQ ID NO: 10642 - RNA, 20 nt, synthetic construct
  source 1..20: mol_type = other RNA
agcctcgggctaaacccagc

SEQ ID NO: 10643 - RNA, 20 nt, synthetic construct
  source 1..20: mol_type = other RNA
gttgagccttcaggccagct

SEQ ID NO: 10644 - RNA, 20 nt, synthetic construct
  source 1..20: mol_type = other RNA
agttgagccttcaggccagc

SEQ ID NO: 10645 - RNA, 20 nt, synthetic construct
  source 1..20: mol_type = other RNA
gctaaacccagctggcctga

SEQ ID NO: 10646 - RNA, 20 nt, synthetic construct
  source 1..20: mol_type = other RNA
ttgatgtgagttgagccttc

SEQ ID NO: 10647 - RNA, 20 nt, synthetic construct
  source 1..20: mol_type = other RNA
aaggctcaactcacatcaaa

SEQ ID NO: 10648 - RNA, 20 nt, synthetic construct
  source 1..20: mol_type = other RNA
caactcacatcaaacggagc

SEQ ID NO: 10649 - RNA, 20 nt, synthetic construct
  source 1..20: mol_type = other RNA
aactcacatcaaacggagct

SEQ ID NO: 10650 - RNA, 20 nt, synthetic construct
  source 1..20: mol_type = other RNA
ggagaggacacttcaaactg

SEQ ID NO: 10651 - RNA, 20 nt, synthetic construct
  source 1..20: mol_type = other RNA
gtttgaagtgtcctctccga

SEQ ID NO: 10652 - RNA, 20 nt, synthetic construct
  source 1..20: mol_type = other RNA
cccccacttcaccttcggag

SEQ ID NO: 10653 - RNA, 20 nt, synthetic construct
  source 1..20: mol_type = other RNA
tgcttcccccacttcacctt

SEQ ID NO: 10654 - RNA, 20 nt, synthetic construct
  source 1..20: mol_type = other RNA
tgtcctctccgaaggtgaag

SEQ ID NO: 10655 - RNA, 20 nt, synthetic construct
  source 1..20: mol_type = other RNA
gtcctctccgaaggtgaagt

SEQ ID NO: 10656 - RNA, 20 nt, synthetic construct
  source 1..20: mol_type = other RNA
tcctctccgaaggtgaagtg

SEQ ID NO: 10657 - RNA, 20 nt, synthetic construct
  source 1..20: mol_type = other RNA
cctctccgaaggtgaagtgg

SEQ ID NO: 10658 - RNA, 20 nt, synthetic construct
  source 1..20: mol_type = other RNA
gaaggtgaagtgggggaagc

SEQ ID NO: 10659 - RNA, 20 nt, synthetic construct
  source 1..20: mol_type = other RNA
tgggggaagcaggtgcgctc

SEQ ID NO: 10660 - RNA, 20 nt, synthetic construct
  source 1..20: mol_type = other RNA
gggggaagcaggtgcgctcc

SEQ ID NO: 10661 - RNA, 20 nt, synthetic construct
  source 1..20: mol_type = other RNA
tgcctccctgcacttcatcc

SEQ ID NO: 10662 - RNA, 20 nt, synthetic construct
  source 1..20: mol_type = other RNA
tgcgctccgggatgaagtgc

SEQ ID NO: 10663 - RNA, 20 nt, synthetic construct
  source 1..20: mol_type = other RNA
gcgctccgggatgaagtgca

SEQ ID NO: 10664 - RNA, 20 nt, synthetic construct
  source 1..20: mol_type = other RNA
ctccgggatgaagtgcaggg

SEQ ID NO: 10665 - RNA, 20 nt, synthetic construct
  source 1..20: mol_type = other RNA
aagtgcagggaggcaaactc

SEQ ID NO: 10666 - RNA, 20 nt, synthetic construct
  source 1..20: mol_type = other RNA
gcagggaggcaaactctggc

SEQ ID NO: 10667 - RNA, 20 nt, synthetic construct
  source 1..20: mol_type = other RNA
cagggaggcaaactctggct

SEQ ID NO: 10668 - RNA, 20 nt, synthetic construct
  source 1..20: mol_type = other RNA
cagctgcgatggatgtttac

SEQ ID NO: 10669 - RNA, 20 nt, synthetic construct
  source 1..20: mol_type = other RNA
ctgattatttgcagctgcga

SEQ ID NO: 10670 - RNA, 20 nt, synthetic construct
  source 1..20: mol_type = other RNA
ctgcaaataatcagaagcca

SEQ ID NO: 10671 - RNA, 20 nt, synthetic construct
  source 1..20: mol_type = other RNA
aataatcagaagccaaggcc

SEQ ID NO: 10672 - RNA, 20 nt, synthetic construct
  source 1..20: mol_type = other RNA
tcaaatcgatggcctggcct

SEQ ID NO: 10673 - RNA, 20 nt, synthetic construct
  source 1..20: mol_type = other RNA
gcagtgtcaaatcgatggcc

SEQ ID NO: 10674 - RNA, 20 nt, synthetic construct
  source 1..20: mol_type = other RNA
tgcctgcagtgtcaaatcga

SEQ ID NO: 10675 - RNA, 20 nt, synthetic construct
  source 1..20: mol_type = other RNA
ggccatcgatttgacactgc

SEQ ID NO: 10676 - RNA, 20 nt, synthetic construct
  source 1..20: mol_type = other RNA
tttgacactgcaggcagatg

SEQ ID NO: 10677 - RNA, 20 nt, synthetic construct
  source 1..20: mol_type = other RNA
actgcaggcagatgaggtct

SEQ ID NO: 10678 - RNA, 20 nt, synthetic construct
  source 1..20: mol_type = other RNA
ctgcaggcagatgaggtctt

SEQ ID NO: 10679 - RNA, 20 nt, synthetic construct
  source 1..20: mol_type = other RNA
cacagaagggggaacgcaag

SEQ ID NO: 10680 - RNA, 20 nt, synthetic construct
  source 1..20: mol_type = other RNA
gcacctgctcccacagaagg

SEQ ID NO: 10681 - RNA, 20 nt, synthetic construct
  source 1..20: mol_type = other RNA
ctcttgcgttcccccttctg

SEQ ID NO: 10682 - RNA, 20 nt, synthetic construct
  source 1..20: mol_type = other RNA
ggcacctgctcccacagaag

SEQ ID NO: 10683 - RNA, 20 nt, synthetic construct
  source 1..20: mol_type = other RNA
tcttgcgttcccccttctgt

SEQ ID NO: 10684 - RNA, 20 nt, synthetic construct
  source 1..20: mol_type = other RNA
aggcacctgctcccacagaa

SEQ ID NO: 10685 - RNA, 20 nt, synthetic construct
  source 1..20: mol_type = other RNA
aaggcacctgctcccacaga

SEQ ID NO: 10686 - RNA, 20 nt, synthetic construct
  source 1..20: mol_type = other RNA
gttcccccttctgtgggagc

SEQ ID NO: 10687 - RNA, 20 nt, synthetic construct
  source 1..20: mol_type = other RNA
actgagtgctgaggttggga

SEQ ID NO: 10688 - RNA, 20 nt, synthetic construct
  source 1..20: mol_type = other RNA
tgggactgagtgctgaggtt

SEQ ID NO: 10689 - RNA, 20 nt, synthetic construct
  source 1..20: mol_type = other RNA
ttgggactgagtgctgaggt

SEQ ID NO: 10690 - RNA, 20 nt, synthetic construct
  source 1..20: mol_type = other RNA
gagattgggactgagtgctg

SEQ ID NO: 10691 - RNA, 20 nt, synthetic construct
  source 1..20: mol_type = other RNA
aggagagtggaagagagatt

SEQ ID NO: 10692 - RNA, 20 nt, synthetic construct
  source 1..20: mol_type = other RNA
caggagagtggaagagagat

SEQ ID NO: 10693 - RNA, 20 nt, synthetic construct
  source 1..20: mol_type = other RNA
caatctctcttccactctcc

SEQ ID NO: 10694 - RNA, 20 nt, synthetic construct
  source 1..20: mol_type = other RNA
cctgtttgaacccaggagag

SEQ ID NO: 10695 - RNA, 20 nt, synthetic construct
  source 1..20: mol_type = other RNA
aatctctcttccactctcct

SEQ ID NO: 10696 - RNA, 20 nt, synthetic construct
  source 1..20: mol_type = other RNA
agaggttcctgtttgaaccc

SEQ ID NO: 10697 - RNA, 20 nt, synthetic construct
  source 1..20: mol_type = other RNA
ccactctcctgggttcaaac

SEQ ID NO: 10698 - RNA, 20 nt, synthetic construct
  source 1..20: mol_type = other RNA
tcaaacaggaacctctctgt

SEQ ID NO: 10699 - RNA, 20 nt, synthetic construct
  source 1..20: mol_type = other RNA
aaagcttcgtgccaacagag

SEQ ID NO: 10700 - RNA, 20 nt, synthetic construct
  source 1..20: mol_type = other RNA
ctgttggcacgaagcttttg

SEQ ID NO: 10701 - RNA, 20 nt, synthetic construct
  source 1..20: mol_type = other RNA
tgttggcacgaagcttttga

SEQ ID NO: 10702 - RNA, 20 nt, synthetic construct
  source 1..20: mol_type = other RNA
gttggcacgaagcttttgag

SEQ ID NO: 10703 - RNA, 20 nt, synthetic construct
  source 1..20: mol_type = other RNA
acgaagcttttgaggggagc

SEQ ID NO: 10704 - RNA, 20 nt, synthetic construct
  source 1..20: mol_type = other RNA
ggggagcaggtctaacaaga

SEQ ID NO: 10705 - RNA, 20 nt, synthetic construct
  source 1..20: mol_type = other RNA
aggtctaacaagaaggaaaa

SEQ ID NO: 10706 - RNA, 20 nt, synthetic construct
  source 1..20: mol_type = other RNA
ggtctaacaagaaggaaaaa

SEQ ID NO: 10707 - RNA, 20 nt, synthetic construct
  source 1..20: mol_type = other RNA
gtctaacaagaaggaaaaag

SEQ ID NO: 10708 - RNA, 20 nt, synthetic construct
  source 1..20: mol_type = other RNA
tctaacaagaaggaaaaagg

SEQ ID NO: 10709 - RNA, 20 nt, synthetic construct
  source 1..20: mol_type = other RNA
ctaacaagaaggaaaaaggg

SEQ ID NO: 10710 - RNA, 20 nt, synthetic construct
  source 1..20: mol_type = other RNA
aaaaaggggggttattagca

SEQ ID NO: 10711 - RNA, 20 nt, synthetic construct
  source 1..20: mol_type = other RNA
gccaacctggtggcagggtg

SEQ ID NO: 10712 - RNA, 20 nt, synthetic construct
  source 1..20: mol_type = other RNA
agccaacctggtggcagggt

SEQ ID NO: 10713 - RNA, 20 nt, synthetic construct
  source 1..20: mol_type = other RNA
cagccaacctggtggcaggg

SEQ ID NO: 10714 - RNA, 20 nt, synthetic construct
  source 1..20: mol_type = other RNA
ccccagccaacctggtggca

SEQ ID NO: 10715 - RNA, 20 nt, synthetic construct
  source 1..20: mol_type = other RNA
ggaagccccaccctgccacc

SEQ ID NO: 10716 - RNA, 20 nt, synthetic construct
  source 1..20: mol_type = other RNA
tccccagccaacctggtggc

SEQ ID NO: 10717 - RNA, 20 nt, synthetic construct
  source 1..20: mol_type = other RNA
gccccaccctgccaccaggt

SEQ ID NO: 10718 - RNA, 20 nt, synthetic construct
  source 1..20: mol_type = other RNA
cctgtccccagccaacctgg

SEQ ID NO: 10719 - RNA, 20 nt, synthetic construct
  source 1..20: mol_type = other RNA
gtccctgtccccagccaacc

SEQ ID NO: 10720 - RNA, 20 nt, synthetic construct
  source 1..20: mol_type = other RNA
caccctgccaccaggttggc

SEQ ID NO: 10721 - RNA, 20 nt, synthetic construct
  source 1..20: mol_type = other RNA
accctgccaccaggttggct

SEQ ID NO: 10722 - RNA, 20 nt, synthetic construct
  source 1..20: mol_type = other RNA
ccctgccaccaggttggctg

SEQ ID NO: 10723 - RNA, 20 nt, synthetic construct
  source 1..20: mol_type = other RNA
ccaccaggttggctggggac

SEQ ID NO: 10724 - RNA, 20 nt, synthetic construct
  source 1..20: mol_type = other RNA
caccaggttggctggggaca

SEQ ID NO: 10725 - RNA, 20 nt, synthetic construct
  source 1..20: mol_type = other RNA
gcctcccgagcctggtggat

SEQ ID NO: 10726 - RNA, 20 nt, synthetic construct
  source 1..20: mol_type = other RNA
gggacagggaccaatccacc

SEQ ID NO: 10727 - RNA, 20 nt, synthetic construct
  source 1..20: mol_type = other RNA
cccaagcctcccgagcctgg

SEQ ID NO: 10728 - RNA, 20 nt, synthetic construct
  source 1..20: mol_type = other RNA
agggaccaatccaccaggct

SEQ ID NO: 10729 - RNA, 20 nt, synthetic construct
  source 1..20: mol_type = other RNA
gggaccaatccaccaggctc

SEQ ID NO: 10730 - RNA, 20 nt, synthetic construct
  source 1..20: mol_type = other RNA
caccccaagcctcccgagcc

SEQ ID NO: 10731 - RNA, 20 nt, synthetic construct
  source 1..20: mol_type = other RNA
accaatccaccaggctcggg

SEQ ID NO: 10732 - RNA, 20 nt, synthetic construct
  source 1..20: mol_type = other RNA
tccaccaggctcgggaggct

SEQ ID NO: 10733 - RNA, 20 nt, synthetic construct
  source 1..20: mol_type = other RNA
ccaccaggctcgggaggctt

SEQ ID NO: 10734 - RNA, 20 nt, synthetic construct
  source 1..20: mol_type = other RNA
caccaggctcgggaggcttg

SEQ ID NO: 10735 - RNA, 20 nt, synthetic construct
  source 1..20: mol_type = other RNA
caggctcgggaggcttgggg

SEQ ID NO: 10736 - RNA, 20 nt, synthetic construct
  source 1..20: mol_type = other RNA
aggctcgggaggcttggggt

SEQ ID NO: 10737 - RNA, 20 nt, synthetic construct
  source 1..20: mol_type = other RNA
ggctcgggaggcttggggtg

SEQ ID NO: 10738 - RNA, 20 nt, synthetic construct
  source 1..20: mol_type = other RNA
cgggaggcttggggtggggc

SEQ ID NO: 10739 - RNA, 20 nt, synthetic construct
  source 1..20: mol_type = other RNA
gggaggcttggggtggggca

SEQ ID NO: 10740 - RNA, 20 nt, synthetic construct
  source 1..20: mol_type = other RNA
tccctaaatttgagggatgg

SEQ ID NO: 10741 - RNA, 20 nt, synthetic construct
  source 1..20: mol_type = other RNA
ggttccctaaatttgaggga

SEQ ID NO: 10742 - RNA, 20 nt, synthetic construct
  source 1..20: mol_type = other RNA
cagtggttccctaaatttga

SEQ ID NO: 10743 - RNA, 20 nt, synthetic construct
  source 1..20: mol_type = other RNA
ccagtggttccctaaatttg

SEQ ID NO: 10744 - RNA, 20 nt, synthetic construct
  source 1..20: mol_type = other RNA
ttcctccatccctcaaattt

SEQ ID NO: 10745 - RNA, 20 nt, synthetic construct
  source 1..20: mol_type = other RNA
tcctccatccctcaaattta

SEQ ID NO: 10746 - RNA, 20 nt, synthetic construct
  source 1..20: mol_type = other RNA
cctcaaatttagggaaccac

SEQ ID NO: 10747 - RNA, 20 nt, synthetic construct
  source 1..20: mol_type = other RNA
ctcaaatttagggaaccact

SEQ ID NO: 10748 - RNA, 20 nt, synthetic construct
  source 1..20: mol_type = other RNA
cctgagtctggggctcccag

SEQ ID NO: 10749 - RNA, 20 nt, synthetic construct
  source 1..20: mol_type = other RNA
acattttcagcctgagtctg

SEQ ID NO: 10750 - RNA, 20 nt, synthetic construct
  source 1..20: mol_type = other RNA
ccactgggagccccagactc

SEQ ID NO: 10751 - RNA, 20 nt, synthetic construct
  source 1..20: mol_type = other RNA
gacattttcagcctgagtct

SEQ ID NO: 10752 - RNA, 20 nt, synthetic construct
  source 1..20: mol_type = other RNA
agacattttcagcctgagtc

SEQ ID NO: 10753 - RNA, 20 nt, synthetic construct
  source 1..20: mol_type = other RNA
cccagggtctctgagaaatt

SEQ ID NO: 10754 - RNA, 20 nt, synthetic construct
  source 1..20: mol_type = other RNA
gcctaatttctcagagaccc

SEQ ID NO: 10755 - RNA, 20 nt, synthetic construct
  source 1..20: mol_type = other RNA
cctaatttctcagagaccct

SEQ ID NO: 10756 - RNA, 20 nt, synthetic construct
  source 1..20: mol_type = other RNA
atttctcagagaccctgggc

SEQ ID NO: 10757 - RNA, 20 nt, synthetic construct
  source 1..20: mol_type = other RNA
tgcactggttctccagccca

SEQ ID NO: 10758 - RNA, 20 nt, synthetic construct
  source 1..20: mol_type = other RNA
ttgcactggttctccagccc

SEQ ID NO: 10759 - RNA, 20 nt, synthetic construct
  source 1..20: mol_type = other RNA
tctcccgtgtgacattgcac

SEQ ID NO: 10760 - RNA, 20 nt, synthetic construct
  source 1..20: mol_type = other RNA
agaaccagtgcaatgtcaca

SEQ ID NO: 10761 - RNA, 20 nt, synthetic construct
  source 1..20: mol_type = other RNA
gaaccagtgcaatgtcacac

SEQ ID NO: 10762 - RNA, 20 nt, synthetic construct
  source 1..20: mol_type = other RNA
agtgcaatgtcacacgggag

SEQ ID NO: 10763 - RNA, 20 nt, synthetic construct
  source 1..20: mol_type = other RNA
caatgtcacacgggagagga

SEQ ID NO: 10764 - RNA, 20 nt, synthetic construct
  source 1..20: mol_type = other RNA
ggaaggactgtcctgtttat

SEQ ID NO: 10765 - RNA, 20 nt, synthetic construct
  source 1..20: mol_type = other RNA
cctcctccctcccaataaac

SEQ ID NO: 10766 - RNA, 20 nt, synthetic construct
  source 1..20: mol_type = other RNA
gaaggactgtcctgtttatt

SEQ ID NO: 10767 - RNA, 20 nt, synthetic construct
  source 1..20: mol_type = other RNA
ggactgtcctgtttattggg

SEQ ID NO: 10768 - RNA, 20 nt, synthetic construct
  source 1..20: mol_type = other RNA
gactgtcctgtttattggga

SEQ ID NO: 10769 - RNA, 20 nt, synthetic construct
  source 1..20: mol_type = other RNA
tgtcctgtttattgggaggg

SEQ ID NO: 10770 - RNA, 20 nt, synthetic construct
  source 1..20: mol_type = other RNA
cctgtttattgggagggagg

SEQ ID NO: 10771 - RNA, 20 nt, synthetic construct
  source 1..20: mol_type = other RNA
ctgtttattgggagggagga

SEQ ID NO: 10772 - RNA, 20 nt, synthetic construct
  source 1..20: mol_type = other RNA
tgtttattgggagggaggag

SEQ ID NO: 10773 - RNA, 20 nt, synthetic construct
  source 1..20: mol_type = other RNA
gtttattgggagggaggagg

SEQ ID NO: 10774 - RNA, 20 nt, synthetic construct
  source 1..20: mol_type = other RNA
gggagggaggagggggatgc

SEQ ID NO: 10775 - RNA, 20 nt, synthetic construct
  source 1..20: mol_type = other RNA
gatgctggtgcagcctgctc

SEQ ID NO: 10776 - RNA, 20 nt, synthetic construct
  source 1..20: mol_type = other RNA
accctgggtgactcctgagc

SEQ ID NO: 10777 - RNA, 20 nt, synthetic construct
  source 1..20: mol_type = other RNA
agcctgctcaggagtcaccc

SEQ ID NO: 10778 - RNA, 20 nt, synthetic construct
  source 1..20: mol_type = other RNA
gcctgctcaggagtcaccca

SEQ ID NO: 10779 - RNA, 20 nt, synthetic construct
  source 1..20: mol_type = other RNA
caagtcagccctcagaccct

SEQ ID NO: 10780 - RNA, 20 nt, synthetic construct
  source 1..20: mol_type = other RNA
gcaagtcagccctcagaccc

SEQ ID NO: 10781 - RNA, 20 nt, synthetic construct
  source 1..20: mol_type = other RNA
caggagtcacccagggtctg

SEQ ID NO: 10782 - RNA, 20 nt, synthetic construct
  source 1..20: mol_type = other RNA
aggagtcacccagggtctga

SEQ ID NO: 10783 - RNA, 20 nt, synthetic construct
  source 1..20: mol_type = other RNA
tgagggctgacttgcagctc

SEQ ID NO: 10784 - RNA, 20 nt, synthetic construct
  source 1..20: mol_type = other RNA
gagggctgacttgcagctct

SEQ ID NO: 10785 - RNA, 20 nt, synthetic construct
  source 1..20: mol_type = other RNA
ctacccagcgctggctcagc

SEQ ID NO: 10786 - RNA, 20 nt, synthetic construct
  source 1..20: mol_type = other RNA
tgggccagctgagccagcgc

SEQ ID NO: 10787 - RNA, 20 nt, synthetic construct
  source 1..20: mol_type = other RNA
gggccagctgagccagcgct

SEQ ID NO: 10788 - RNA, 20 nt, synthetic construct
  source 1..20: mol_type = other RNA
ccctgcccactacccagcgc

SEQ ID NO: 10789 - RNA, 20 nt, synthetic construct
  source 1..20: mol_type = other RNA
gctgagccagcgctgggtag

SEQ ID NO: 10790 - RNA, 20 nt, synthetic construct
  source 1..20: mol_type = other RNA
ctgagccagcgctgggtagt

SEQ ID NO: 10791 - RNA, 20 nt, synthetic construct
  source 1..20: mol_type = other RNA
gccagcgctgggtagtgggc

SEQ ID NO: 10792 - RNA, 20 nt, synthetic construct
  source 1..20: mol_type = other RNA
ccagcgctgggtagtgggca

SEQ ID NO: 10793 - RNA, 20 nt, synthetic construct
  source 1..20: mol_type = other RNA
gctgggtagtgggcagggct

SEQ ID NO: 10794 - RNA, 20 nt, synthetic construct
  source 1..20: mol_type = other RNA
atttttccgggcaaggtgga

SEQ ID NO: 10795 - RNA, 20 nt, synthetic construct
  source 1..20: mol_type = other RNA
aagcatttttccgggcaagg

SEQ ID NO: 10796 - RNA, 20 nt, synthetic construct
  source 1..20: mol_type = other RNA
gcaacaccttccaccttgcc

SEQ ID NO: 10797 - RNA, 20 nt, synthetic construct
  source 1..20: mol_type = other RNA
gcaaagcatttttccgggca

SEQ ID NO: 10798 - RNA, 20 nt, synthetic construct
  source 1..20: mol_type = other RNA
aggttgcaaagcatttttcc

SEQ ID NO: 10799 - RNA, 20 nt, synthetic construct
  source 1..20: mol_type = other RNA
taggttgcaaagcatttttc

SEQ ID NO: 10800 - RNA, 20 nt, synthetic construct
  source 1..20: mol_type = other RNA
aaaaatgctttgcaacctac

SEQ ID NO: 10801 - RNA, 20 nt, synthetic construct
  source 1..20: mol_type = other RNA
atgctttgcaacctacagga

SEQ ID NO: 10802 - RNA, 20 nt, synthetic construct
  source 1..20: mol_type = other RNA
tgtggctattgccttcctgt

SEQ ID NO: 10803 - RNA, 20 nt, synthetic construct
  source 1..20: mol_type = other RNA
gctgctgagtaacttggctg

SEQ ID NO: 10804 - RNA, 20 nt, synthetic construct
  source 1..20: mol_type = other RNA
agtggggctgctgagtaact

SEQ ID NO: 10805 - RNA, 20 nt, synthetic construct
  source 1..20: mol_type = other RNA
agttactcagcagccccact

SEQ ID NO: 10806 - RNA, 20 nt, synthetic construct
  source 1..20: mol_type = other RNA
ctgggagaaagagccaagtg

SEQ ID NO: 10807 - RNA, 20 nt, synthetic construct
  source 1..20: mol_type = other RNA
cctgggagaaagagccaagt

SEQ ID NO: 10808 - RNA, 20 nt, synthetic construct
  source 1..20: mol_type = other RNA
tcctgggagaaagagccaag

SEQ ID NO: 10809 - RNA, 20 nt, synthetic construct
  source 1..20: mol_type = other RNA
cccacttggctctttctccc

SEQ ID NO: 10810 - RNA, 20 nt, synthetic construct
  source 1..20: mol_type = other RNA
tggagatgatgctgcatcct

SEQ ID NO: 10811 - RNA, 20 nt, synthetic construct
  source 1..20: mol_type = other RNA
atggagatgatgctgcatcc

SEQ ID NO: 10812 - RNA, 20 nt, synthetic construct
  source 1..20: mol_type = other RNA
aggatgcagcatcatctcca

SEQ ID NO: 10813 - RNA, 20 nt, synthetic construct
  source 1..20: mol_type = other RNA
gcagcatcatctccatggcc

SEQ ID NO: 10814 - RNA, 20 nt, synthetic construct
  source 1..20: mol_type = other RNA
cgtgccagggggccaggcca

SEQ ID NO: 10815 - RNA, 20 nt, synthetic construct
  source 1..20: mol_type = other RNA
cggggacgtgccagggggcc

SEQ ID NO: 10816 - RNA, 20 nt, synthetic construct
  source 1..20: mol_type = other RNA
atctccatggcctggccccc

SEQ ID NO: 10817 - RNA, 20 nt, synthetic construct
  source 1..20: mol_type = other RNA
ggaaacggggacgtgccagg

SEQ ID NO: 10818 - RNA, 20 nt, synthetic construct
  source 1..20: mol_type = other RNA
gggaaacggggacgtgccag

SEQ ID NO: 10819 - RNA, 20 nt, synthetic construct
  source 1..20: mol_type = other RNA
tgggaaacggggacgtgcca

SEQ ID NO: 10820 - RNA, 20 nt, synthetic construct
  source 1..20: mol_type = other RNA
gtgggaaacggggacgtgcc

SEQ ID NO: 10821 - RNA, 20 nt, synthetic construct
  source 1..20: mol_type = other RNA
agagaaggcagtgggaaacg

SEQ ID NO: 10822 - RNA, 20 nt, synthetic construct
  source 1..20: mol_type = other RNA
cagagaaggcagtgggaaac

SEQ ID NO: 10823 - RNA, 20 nt, synthetic construct
  source 1..20: mol_type = other RNA
acagagaaggcagtgggaaa

SEQ ID NO: 10824 - RNA, 20 nt, synthetic construct
  source 1..20: mol_type = other RNA
aggcacacagagaaggcagt

SEQ ID NO: 10825 - RNA, 20 nt, synthetic construct
  source 1..20: mol_type = other RNA
taggcacacagagaaggcag

SEQ ID NO: 10826 - RNA, 20 nt, synthetic construct
  source 1..20: mol_type = other RNA
cccggctaggcacacagaga

SEQ ID NO: 10827 - RNA, 20 nt, synthetic construct
  source 1..20: mol_type = other RNA
gccttctctgtgtgcctagc

SEQ ID NO: 10828 - RNA, 20 nt, synthetic construct
  source 1..20: mol_type = other RNA
ccttctctgtgtgcctagcc

SEQ ID NO: 10829 - RNA, 20 nt, synthetic construct
  source 1..20: mol_type = other RNA
agagacactggcacccggct

SEQ ID NO: 10830 - RNA, 20 nt, synthetic construct
  source 1..20: mol_type = other RNA
gctacagagacactggcacc

SEQ ID NO: 10831 - RNA, 20 nt, synthetic construct
  source 1..20: mol_type = other RNA
acgaggtgctacagagacac

SEQ ID NO: 10832 - RNA, 20 nt, synthetic construct
  source 1..20: mol_type = other RNA
gggttgggcatgggaacacg

SEQ ID NO: 10833 - RNA, 20 nt, synthetic construct
  source 1..20: mol_type = other RNA
gctgcagaggggttgggcat

SEQ ID NO: 10834 - RNA, 20 nt, synthetic construct
  source 1..20: mol_type = other RNA
ggctgcagaggggttgggca

SEQ ID NO: 10835 - RNA, 20 nt, synthetic construct
  source 1..20: mol_type = other RNA
gagggggctgcagaggggtt

SEQ ID NO: 10836 - RNA, 20 nt, synthetic construct
  source 1..20: mol_type = other RNA
tgagggggctgcagaggggt

SEQ ID NO: 10837 - RNA, 20 nt, synthetic construct
  source 1..20: mol_type = other RNA
ggcttgagggggctgcagag

SEQ ID NO: 10838 - RNA, 20 nt, synthetic construct
  source 1..20: mol_type = other RNA
gggcttgagggggctgcaga

SEQ ID NO: 10839 - RNA, 20 nt, synthetic construct
  source 1..20: mol_type = other RNA
agggcttgagggggctgcag

SEQ ID NO: 10840 - RNA, 20 nt, synthetic construct
  source 1..20: mol_type = other RNA
aatcagagcagggcttgagg

SEQ ID NO: 10841 - RNA, 20 nt, synthetic construct
  source 1..20: mol_type = other RNA
gaatcagagcagggcttgag

SEQ ID NO: 10842 - RNA, 20 nt, synthetic construct
  source 1..20: mol_type = other RNA
ggaatcagagcagggcttga

SEQ ID NO: 10843 - RNA, 20 nt, synthetic construct
  source 1..20: mol_type = other RNA
tggaatcagagcagggcttg

SEQ ID NO: 10844 - RNA, 20 nt, synthetic construct
  source 1..20: mol_type = other RNA
tgaggcttggaatcagagca

SEQ ID NO: 10845 - RNA, 20 nt, synthetic construct
  source 1..20: mol_type = other RNA
atgaggcttggaatcagagc

SEQ ID NO: 10846 - RNA, 20 nt, synthetic construct
  source 1..20: mol_type = other RNA
gtgagctgggagatgaggct

SEQ ID NO: 10847 - RNA, 20 nt, synthetic construct
  source 1..20: mol_type = other RNA
ggatagtgagctgggagatg

SEQ ID NO: 10848 - RNA, 20 nt, synthetic construct
  source 1..20: mol_type = other RNA
tgcggaaaggatagtgagct

SEQ ID NO: 10849 - RNA, 20 nt, synthetic construct
  source 1..20: mol_type = other RNA
ttgcggaaaggatagtgagc

SEQ ID NO: 10850 - RNA, 20 nt, synthetic construct
  source 1..20: mol_type = other RNA
gttcagtgaagtttgcggaa

SEQ ID NO: 10851 - RNA, 20 nt, synthetic construct
  source 1..20: mol_type = other RNA
gagatgttcagtgaagtttg

SEQ ID NO: 10852 - RNA, 20 nt, synthetic construct
  source 1..20: mol_type = other RNA
gacatgtattgttgtttgac

SEQ ID NO: 10853 - RNA, 20 nt, synthetic construct
  source 1..20: mol_type = other RNA
acatgtattgttgtttgaca

SEQ ID NO: 10854 - RNA, 20 nt, synthetic construct
  source 1..20: mol_type = other RNA
gacagggtgctattgacatt

SEQ ID NO: 10855 - RNA, 20 nt, synthetic construct
  source 1..20: mol_type = other RNA
acagggtgctattgacattt

SEQ ID NO: 10856 - RNA, 20 nt, synthetic construct
  source 1..20: mol_type = other RNA
cagggtgctattgacatttg

SEQ ID NO: 10857 - RNA, 20 nt, synthetic construct
  source 1..20: mol_type = other RNA
gtgctattgacatttggggt

SEQ ID NO: 10858 - RNA, 20 nt, synthetic construct
  source 1..20: mol_type = other RNA
atttggggtaggacaattct

SEQ ID NO: 10859 - RNA, 20 nt, synthetic construct
  source 1..20: mol_type = other RNA
tggggtaggacaattcttgg

SEQ ID NO: 10860 - RNA, 20 nt, synthetic construct
  source 1..20: mol_type = other RNA
ggtaggacaattcttggagg

SEQ ID NO: 10861 - RNA, 20 nt, synthetic construct
  source 1..20: mol_type = other RNA
gtaggacaattcttggaggt

SEQ ID NO: 10862 - RNA, 20 nt, synthetic construct
  source 1..20: mol_type = other RNA
taggacaattcttggaggtg

SEQ ID NO: 10863 - RNA, 20 nt, synthetic construct
  source 1..20: mol_type = other RNA
gacaattcttggaggtgggg

SEQ ID NO: 10864 - RNA, 20 nt, synthetic construct
  source 1..20: mol_type = other RNA
tggaggtggggtggctgttc

SEQ ID NO: 10865 - RNA, 20 nt, synthetic construct
  source 1..20: mol_type = other RNA
ggaggtggggtggctgttct

SEQ ID NO: 10866 - RNA, 20 nt, synthetic construct
  source 1..20: mol_type = other RNA
tgagcatttagcagcatctc

SEQ ID NO: 10867 - RNA, 20 nt, synthetic construct
  source 1..20: mol_type = other RNA
ttagcagcatctctggctcc

SEQ ID NO: 10868 - RNA, 20 nt, synthetic construct
  source 1..20: mol_type = other RNA
gctactggcatttagtggcc

SEQ ID NO: 10869 - RNA, 20 nt, synthetic construct
  source 1..20: mol_type = other RNA
ggggtgctactggcatttag

SEQ ID NO: 10870 - RNA, 20 nt, synthetic construct
  source 1..20: mol_type = other RNA
ccagtggccaggggtgctac

SEQ ID NO: 10871 - RNA, 20 nt, synthetic construct
  source 1..20: mol_type = other RNA
ctaaatgccagtagcacccc

SEQ ID NO: 10872 - RNA, 20 nt, synthetic construct
  source 1..20: mol_type = other RNA
ttagttgttccagtggccag

SEQ ID NO: 10873 - RNA, 20 nt, synthetic construct
  source 1..20: mol_type = other RNA
tttagttgttccagtggcca

SEQ ID NO: 10874 - RNA, 20 nt, synthetic construct
  source 1..20: mol_type = other RNA
ccagtagcacccctggccac

SEQ ID NO: 10875 - RNA, 20 nt, synthetic construct
  source 1..20: mol_type = other RNA
ttttagttgttccagtggcc

SEQ ID NO: 10876 - RNA, 20 nt, synthetic construct
  source 1..20: mol_type = other RNA
ggcatttttagttgttccag

SEQ ID NO: 10877 - RNA, 20 nt, synthetic construct
  source 1..20: mol_type = other RNA
accttggaaatagggtagga

SEQ ID NO: 10878 - RNA, 20 nt, synthetic construct
  source 1..20: mol_type = other RNA
gaccttggaaatagggtagg

SEQ ID NO: 10879 - RNA, 20 nt, synthetic construct
  source 1..20: mol_type = other RNA
gtcgaccttggaaatagggt

SEQ ID NO: 10880 - RNA, 20 nt, synthetic construct
  source 1..20: mol_type = other RNA
ttaggtcgaccttggaaata

SEQ ID NO: 10881 - RNA, 20 nt, synthetic construct
  source 1..20: mol_type = other RNA
cttaggtcgaccttggaaat

SEQ ID NO: 10882 - RNA, 20 nt, synthetic construct
  source 1..20: mol_type = other RNA
gccctcctaccctatttcca

SEQ ID NO: 10883 - RNA, 20 nt, synthetic construct
  source 1..20: mol_type = other RNA
ccgcccccttaggtcgacct

SEQ ID NO: 10884 - RNA, 20 nt, synthetic construct
  source 1..20: mol_type = other RNA
ctatttccaaggtcgaccta

SEQ ID NO: 10885 - RNA, 20 nt, synthetic construct
  source 1..20: mol_type = other RNA
tatttccaaggtcgacctaa

SEQ ID NO: 10886 - RNA, 20 nt, synthetic construct
  source 1..20: mol_type = other RNA
atttccaaggtcgacctaag

SEQ ID NO: 10887 - RNA, 20 nt, synthetic construct
  source 1..20: mol_type = other RNA
tttccaaggtcgacctaagg

SEQ ID NO: 10888 - RNA, 20 nt, synthetic construct
  source 1..20: mol_type = other RNA
ggaaacagttccgccccctt

SEQ ID NO: 10889 - RNA, 20 nt, synthetic construct
  source 1..20: mol_type = other RNA
ccaaggtcgacctaaggggg

SEQ ID NO: 10890 - RNA, 20 nt, synthetic construct
  source 1..20: mol_type = other RNA
atacgatgcatgggtctcaa

SEQ ID NO: 10891 - RNA, 20 nt, synthetic construct
  source 1..20: mol_type = other RNA
tcttatcctatacgatgcat

SEQ ID NO: 10892 - RNA, 20 nt, synthetic construct
  source 1..20: mol_type = other RNA
ttcttatcctatacgatgca

SEQ ID NO: 10893 - RNA, 20 nt, synthetic construct
  source 1..20: mol_type = other RNA
ttgagacccatgcatcgtat

SEQ ID NO: 10894 - RNA, 20 nt, synthetic construct
  source 1..20: mol_type = other RNA
tcgtataggataagaaactg

SEQ ID NO: 10895 - RNA, 20 nt, synthetic construct
  source 1..20: mol_type = other RNA
tgaggttcttatcatttaat

SEQ ID NO: 10896 - RNA, 20 nt, synthetic construct
  source 1..20: mol_type = other RNA
tttaataggataagaaattg

SEQ ID NO: 10897 - RNA, 20 nt, synthetic construct
  source 1..20: mol_type = other RNA
gcatctttaggcaggttact

SEQ ID NO: 10898 - RNA, 20 nt, synthetic construct
  source 1..20: mol_type = other RNA
atagctgtgcatctttaggc

SEQ ID NO: 10899 - RNA, 20 nt, synthetic construct
  source 1..20: mol_type = other RNA
tctcatagctgtgcatcttt

SEQ ID NO: 10900 - RNA, 20 nt, synthetic construct
  source 1..20: mol_type = other RNA
taaagatgcacagctatgag

SEQ ID NO: 10901 - RNA, 20 nt, synthetic construct
  source 1..20: mol_type = other RNA
acagctatgagaggcaaagc

SEQ ID NO: 10902 - RNA, 20 nt, synthetic construct
  source 1..20: mol_type = other RNA
atgagaggcaaagctggcac

SEQ ID NO: 10903 - RNA, 20 nt, synthetic construct
  source 1..20: mol_type = other RNA
aggcaaagctggcactggct

SEQ ID NO: 10904 - RNA, 20 nt, synthetic construct
  source 1..20: mol_type = other RNA
cactggcttggtaataacga

SEQ ID NO: 10905 - RNA, 20 nt, synthetic construct
  source 1..20: mol_type = other RNA
cttggtaataacgatggaaa

SEQ ID NO: 10906 - RNA, 20 nt, synthetic construct
  source 1..20: mol_type = other RNA
gaaacggtctgaatgagagc

SEQ ID NO: 10907 - RNA, 20 nt, synthetic construct
  source 1..20: mol_type = other RNA
tctgctaagagctcaggaaa

SEQ ID NO: 10908 - RNA, 20 nt, synthetic construct
  source 1..20: mol_type = other RNA
tcagcgtctgctaagagctc

SEQ ID NO: 10909 - RNA, 20 nt, synthetic construct
  source 1..20: mol_type = other RNA
tgagctcttagcagacgctg

SEQ ID NO: 10910 - RNA, 20 nt, synthetic construct
  source 1..20: mol_type = other RNA
aggtctcatggcacttagca

SEQ ID NO: 10911 - RNA, 20 nt, synthetic construct
  source 1..20: mol_type = other RNA
aaggtctcatggcacttagc

SEQ ID NO: 10912 - RNA, 20 nt, synthetic construct
  source 1..20: mol_type = other RNA
cagcctctgctaaggtctca

SEQ ID NO: 10913 - RNA, 20 nt, synthetic construct
  source 1..20: mol_type = other RNA
gtgccatgagaccttagcag

SEQ ID NO: 10914 - RNA, 20 nt, synthetic construct
  source 1..20: mol_type = other RNA
ggcacccacagcctctgcta

SEQ ID NO: 10915 - RNA, 20 nt, synthetic construct
  source 1..20: mol_type = other RNA
tgagaccttagcagaggctg

SEQ ID NO: 10916 - RNA, 20 nt, synthetic construct
  source 1..20: mol_type = other RNA
gagaccttagcagaggctgt

SEQ ID NO: 10917 - RNA, 20 nt, synthetic construct
  source 1..20: mol_type = other RNA
tgagtggagggaatggggcg

SEQ ID NO: 10918 - RNA, 20 nt, synthetic construct
  source 1..20: mol_type = other RNA
gtgagtggagggaatggggc

SEQ ID NO: 10919 - RNA, 20 nt, synthetic construct
  source 1..20: mol_type = other RNA
agtgagtggagggaatgggg

SEQ ID NO: 10920 - RNA, 20 nt, synthetic construct
  source 1..20: mol_type = other RNA
aagagtgagtggagggaatg

SEQ ID NO: 10921 - RNA, 20 nt, synthetic construct
  source 1..20: mol_type = other RNA
gaagagtgagtggagggaat

SEQ ID NO: 10922 - RNA, 20 nt, synthetic construct
  source 1..20: mol_type = other RNA
ggaagagtgagtggagggaa

SEQ ID NO: 10923 - RNA, 20 nt, synthetic construct
  source 1..20: mol_type = other RNA
tgcaaggaagagtgagtgga

SEQ ID NO: 10924 - RNA, 20 nt, synthetic construct
  source 1..20: mol_type = other RNA
ctgcaaggaagagtgagtgg

SEQ ID NO: 10925 - RNA, 20 nt, synthetic construct
  source 1..20: mol_type = other RNA
gacctgcaaggaagagtgag

SEQ ID NO: 10926 - RNA, 20 nt, synthetic construct
  source 1..20: mol_type = other RNA
ctccactcactcttccttgc

SEQ ID NO: 10927 - RNA, 20 nt, synthetic construct
  source 1..20: mol_type = other RNA
gaagggcaggtcgacctgca

SEQ ID NO: 10928 - RNA, 20 nt, synthetic construct
  source 1..20: mol_type = other RNA
aggcctcagcaaagaagggc

SEQ ID NO: 10929 - RNA, 20 nt, synthetic construct
  source 1..20: mol_type = other RNA
agaaaggcctcagcaaagaa

SEQ ID NO: 10930 - RNA, 20 nt, synthetic construct
  source 1..20: mol_type = other RNA
gagaaaggcctcagcaaaga

SEQ ID NO: 10931 - RNA, 20 nt, synthetic construct
  source 1..20: mol_type = other RNA
cgacctgcccttctttgctg

SEQ ID NO: 10932 - RNA, 20 nt, synthetic construct
  source 1..20: mol_type = other RNA
caggctctggaggcagagaa

SEQ ID NO: 10933 - RNA, 20 nt, synthetic construct
  source 1..20: mol_type = other RNA
gaggaccaagcaggctctgg

SEQ ID NO: 10934 - RNA, 20 nt, synthetic construct
  source 1..20: mol_type = other RNA
cctgaggaccaagcaggctc

SEQ ID NO: 10935 - RNA, 20 nt, synthetic construct
  source 1..20: mol_type = other RNA
ctctgcctccagagcctgct

SEQ ID NO: 10936 - RNA, 20 nt, synthetic construct
  source 1..20: mol_type = other RNA
ttacagcctgaggaccaagc

SEQ ID NO: 10937 - RNA, 20 nt, synthetic construct
  source 1..20: mol_type = other RNA
ccagagcctgcttggtcctc

SEQ ID NO: 10938 - RNA, 20 nt, synthetic construct
  source 1..20: mol_type = other RNA
ctgcctgcacttacagcctg

SEQ ID NO: 10939 - RNA, 20 nt, synthetic construct
  source 1..20: mol_type = other RNA
ggtcctcaggctgtaagtgc

SEQ ID NO: 10940 - RNA, 20 nt, synthetic construct
  source 1..20: mol_type = other RNA
aggctggtggagggcagcta

SEQ ID NO: 10941 - RNA, 20 nt, synthetic construct
  source 1..20: mol_type = other RNA
ctcaggagcaggctggtgga

SEQ ID NO: 10942 - RNA, 20 nt, synthetic construct
  source 1..20: mol_type = other RNA
tctcaggagcaggctggtgg

SEQ ID NO: 10943 - RNA, 20 nt, synthetic construct
  source 1..20: mol_type = other RNA
gtgtctcaggagcaggctgg

SEQ ID NO: 10944 - RNA, 20 nt, synthetic construct
  source 1..20: mol_type = other RNA
caggtgtctcaggagcaggc

SEQ ID NO: 10945 - RNA, 20 nt, synthetic construct
  source 1..20: mol_type = other RNA
ccagcaggtgtctcaggagc

SEQ ID NO: 10946 - RNA, 20 nt, synthetic construct
  source 1..20: mol_type = other RNA
cctgctcctgagacacctgc

SEQ ID NO: 10947 - RNA, 20 nt, synthetic construct
  source 1..20: mol_type = other RNA
aggattctgcttcaggctgc

SEQ ID NO: 10948 - RNA, 20 nt, synthetic construct
  source 1..20: mol_type = other RNA
tgagtaaaggattctgcttc

SEQ ID NO: 10949 - RNA, 20 nt, synthetic construct
  source 1..20: mol_type = other RNA
gtgcggctgaatctgagtaa

SEQ ID NO: 10950 - RNA, 20 nt, synthetic construct
  source 1..20: mol_type = other RNA
ctctgcagtgagcatctgtg

SEQ ID NO: 10951 - RNA, 20 nt, synthetic construct
  source 1..20: mol_type = other RNA
gctcactgcagagatctcca

SEQ ID NO: 10952 - RNA, 20 nt, synthetic construct
  source 1..20: mol_type = other RNA
tcaaggatgaccacaggcct

SEQ ID NO: 10953 - RNA, 20 nt, synthetic construct
  source 1..20: mol_type = other RNA
gcagagatctccaaggcctg

SEQ ID NO: 10954 - RNA, 20 nt, synthetic construct
  source 1..20: mol_type = other RNA
atgggctcaaggatgaccac

SEQ ID NO: 10955 - RNA, 20 nt, synthetic construct
  source 1..20: mol_type = other RNA
acaaatctgagatgggctca

SEQ ID NO: 10956 - RNA, 20 nt, synthetic construct
  source 1..20: mol_type = other RNA
tatccacacaaatctgagat

SEQ ID NO: 10957 - RNA, 20 nt, synthetic construct
  source 1..20: mol_type = other RNA
ctatccacacaaatctgaga

SEQ ID NO: 10958 - RNA, 20 nt, synthetic construct
  source 1..20: mol_type = other RNA
gagcccatctcagatttgtg

SEQ ID NO: 10959 - RNA, 20 nt, synthetic construct
  source 1..20: mol_type = other RNA
catctcagatttgtgtggat

SEQ ID NO: 10960 - RNA, 20 nt, synthetic construct
  source 1..20: mol_type = other RNA
atctcagatttgtgtggata

SEQ ID NO: 10961 - RNA, 20 nt, synthetic construct
  source 1..20: mol_type = other RNA
ggatagggtgttagagaaca

SEQ ID NO: 10962 - RNA, 20 nt, synthetic construct
  source 1..20: mol_type = other RNA
ttagagaacatggaatcagc

SEQ ID NO: 10963 - RNA, 20 nt, synthetic construct
  source 1..20: mol_type = other RNA
atggaatcagctggatagag

SEQ ID NO: 10964 - RNA, 20 nt, synthetic construct
  source 1..20: mol_type = other RNA
ccccagcctcccaaagtgct

SEQ ID NO: 10965 - RNA, 20 nt, synthetic construct
  source 1..20: mol_type = other RNA
tgcttgtaatcccagcactt

SEQ ID NO: 10966 - RNA, 20 nt, synthetic construct
  source 1..20: mol_type = other RNA
accccagcctcccaaagtgc

SEQ ID NO: 10967 - RNA, 20 nt, synthetic construct
  source 1..20: mol_type = other RNA
gcttgtaatcccagcacttt

SEQ ID NO: 10968 - RNA, 20 nt, synthetic construct
  source 1..20: mol_type = other RNA
tgtaatcccagcactttggg

SEQ ID NO: 10969 - RNA, 20 nt, synthetic construct
  source 1..20: mol_type = other RNA
atcccagcactttgggaggc

SEQ ID NO: 10970 - RNA, 20 nt, synthetic construct
  source 1..20: mol_type = other RNA
tcccagcactttgggaggct

SEQ ID NO: 10971 - RNA, 20 nt, synthetic construct
  source 1..20: mol_type = other RNA
cccagcactttgggaggctg

SEQ ID NO: 10972 - RNA, 20 nt, synthetic construct
  source 1..20: mol_type = other RNA
agcactttgggaggctgggg

SEQ ID NO: 10973 - RNA, 20 nt, synthetic construct
  source 1..20: mol_type = other RNA
gcactttgggaggctggggt

SEQ ID NO: 10974 - RNA, 20 nt, synthetic construct
  source 1..20: mol_type = other RNA
ctttgggaggctggggtggg

SEQ ID NO: 10975 - RNA, 20 nt, synthetic construct
  source 1..20: mol_type = other RNA
tggggtgggaggatcacttg

SEQ ID NO: 10976 - RNA, 20 nt, synthetic construct
  source 1..20: mol_type = other RNA
tgggaggatcacttgaggcc

SEQ ID NO: 10977 - RNA, 20 nt, synthetic construct
  source 1..20: mol_type = other RNA
ccaggctggtctcaaactcc

SEQ ID NO: 10978 - RNA, 20 nt, synthetic construct
  source 1..20: mol_type = other RNA
ccaggagtttgagaccagcc

SEQ ID NO: 10979 - RNA, 20 nt, synthetic construct
  source 1..20: mol_type = other RNA
caggagtttgagaccagcct

SEQ ID NO: 10980 - RNA, 20 nt, synthetic construct
  source 1..20: mol_type = other RNA
tctcactgtgttgcccaggc

SEQ ID NO: 10981 - RNA, 20 nt, synthetic construct
  source 1..20: mol_type = other RNA
acagtctcactgtgttgccc

SEQ ID NO: 10982 - RNA, 20 nt, synthetic construct
  source 1..20: mol_type = other RNA
aaaaaatttaaaaattagcc

SEQ ID NO: 10983 - RNA, 20 nt, synthetic construct
  source 1..20: mol_type = other RNA
agctgagactacactatgcc

SEQ ID NO: 10984 - RNA, 20 nt, synthetic construct
  source 1..20: mol_type = other RNA
atagtgtagtctcagctact

SEQ ID NO: 10985 - RNA, 20 nt, synthetic construct
  source 1..20: mol_type = other RNA
tgtagtctcagctacttgga

SEQ ID NO: 10986 - RNA, 20 nt, synthetic construct
  source 1..20: mol_type = other RNA
ctcagctacttggaaggctg

SEQ ID NO: 10987 - RNA, 20 nt, synthetic construct
  source 1..20: mol_type = other RNA
gctacttggaaggctgaggc

SEQ ID NO: 10988 - RNA, 20 nt, synthetic construct
  source 1..20: mol_type = other RNA
acttggaaggctgaggcagg

SEQ ID NO: 10989 - RNA, 20 nt, synthetic construct
  source 1..20: mol_type = other RNA
cactgcagccttgaactgct

SEQ ID NO: 10990 - RNA, 20 nt, synthetic construct
  source 1..20: mol_type = other RNA
tcactgcagccttgaactgc

SEQ ID NO: 10991 - RNA, 20 nt, synthetic construct
  source 1..20: mol_type = other RNA
tgcgtgagcccagcagttca

SEQ ID NO: 10992 - RNA, 20 nt, synthetic construct
  source 1..20: mol_type = other RNA
gtcacccaggctgggtgcag

SEQ ID NO: 10993 - RNA, 20 nt, synthetic construct
  source 1..20: mol_type = other RNA
tgtcacccaggctgggtgca

SEQ ID NO: 10994 - RNA, 20 nt, synthetic construct
  source 1..20: mol_type = other RNA
ctgtcacccaggctgggtgc

SEQ ID NO: 10995 - RNA, 20 nt, synthetic construct
  source 1..20: mol_type = other RNA
ctgtgcccctgcacccagcc

SEQ ID NO: 10996 - RNA, 20 nt, synthetic construct
  source 1..20: mol_type = other RNA
tgtgcccctgcacccagcct

SEQ ID NO: 10997 - RNA, 20 nt, synthetic construct
  source 1..20: mol_type = other RNA
gggtctctgtcacccaggct

SEQ ID NO: 10998 - RNA, 20 nt, synthetic construct
  source 1..20: mol_type = other RNA
agggtctctgtcacccaggc

SEQ ID NO: 10999 - RNA, 20 nt, synthetic construct
  source 1..20: mol_type = other RNA
agacagggtctctgtcaccc

SEQ ID NO: 11000 - RNA, 20 nt, synthetic construct
  source 1..20: mol_type = other RNA
cttctcttttttttgagaca

SEQ ID NO: 11001 - RNA, 20 nt, synthetic construct
  source 1..20: mol_type = other RNA
tcttctcttttttttgagac

SEQ ID NO: 11002 - RNA, 20 nt, synthetic construct
  source 1..20: mol_type = other RNA
gtctcaaaaaaaagagaaga

SEQ ID NO: 11003 - RNA, 20 nt, synthetic construct
  source 1..20: mol_type = other RNA
aaagagaagatggaatcact

SEQ ID NO: 11004 - RNA, 20 nt, synthetic construct
  source 1..20: mol_type = other RNA
gaagatggaatcactcggtg

SEQ ID NO: 11005 - RNA, 20 nt, synthetic construct
  source 1..20: mol_type = other RNA
acaggactgggagaggagtg

SEQ ID NO: 11006 - RNA, 20 nt, synthetic construct
  source 1..20: mol_type = other RNA
tgtggtcacaggactgggag

SEQ ID NO: 11007 - RNA, 20 nt, synthetic construct
  source 1..20: mol_type = other RNA
cggtttgtggtcacaggact

SEQ ID NO: 11008 - RNA, 20 nt, synthetic construct
  source 1..20: mol_type = other RNA
gcggtttgtggtcacaggac

SEQ ID NO: 11009 - RNA, 20 nt, synthetic construct
  source 1..20: mol_type = other RNA
gggatgcggtttgtggtcac

SEQ ID NO: 11010 - RNA, 20 nt, synthetic construct
  source 1..20: mol_type = other RNA
actgtcggggatgcggtttg

SEQ ID NO: 11011 - RNA, 20 nt, synthetic construct
  source 1..20: mol_type = other RNA
ggctgggactgtcggggatg

SEQ ID NO: 11012 - RNA, 20 nt, synthetic construct
  source 1..20: mol_type = other RNA
gcgcctggctgggactgtcg

SEQ ID NO: 11013 - RNA, 20 nt, synthetic construct
  source 1..20: mol_type = other RNA
agcgcctggctgggactgtc

SEQ ID NO: 11014 - RNA, 20 nt, synthetic construct
  source 1..20: mol_type = other RNA
tagcgcctggctgggactgt

SEQ ID NO: 11015 - RNA, 20 nt, synthetic construct
  source 1..20: mol_type = other RNA
catccccgacagtcccagcc

SEQ ID NO: 11016 - RNA, 20 nt, synthetic construct
  source 1..20: mol_type = other RNA
agccagactagcgcctggct

SEQ ID NO: 11017 - RNA, 20 nt, synthetic construct
  source 1..20: mol_type = other RNA
cagccagactagcgcctggc

SEQ ID NO: 11018 - RNA, 20 nt, synthetic construct
  source 1..20: mol_type = other RNA
gctacagccagactagcgcc

SEQ ID NO: 11019 - RNA, 20 nt, synthetic construct
  source 1..20: mol_type = other RNA
gtcccagccaggcgctagtc

SEQ ID NO: 11020 - RNA, 20 nt, synthetic construct
  source 1..20: mol_type = other RNA
ctggagatctgcacacaaga

SEQ ID NO: 11021 - RNA, 20 nt, synthetic construct
  source 1..20: mol_type = other RNA
actggagatctgcacacaag

SEQ ID NO: 11022 - RNA, 20 nt, synthetic construct
  source 1..20: mol_type = other RNA
cacgtgtagcccattcagac

SEQ ID NO: 11023 - RNA, 20 nt, synthetic construct
  source 1..20: mol_type = other RNA
gtgcagatctccagtctgaa

SEQ ID NO: 11024 - RNA, 20 nt, synthetic construct
  source 1..20: mol_type = other RNA
tgcagatctccagtctgaat

SEQ ID NO: 11025 - RNA, 20 nt, synthetic construct
  source 1..20: mol_type = other RNA
cagtctgaatgggctacacg

SEQ ID NO: 11026 - RNA, 20 nt, synthetic construct
  source 1..20: mol_type = other RNA
cgtggaatttactaacactc

SEQ ID NO: 11027 - RNA, 20 nt, synthetic construct
  source 1..20: mol_type = other RNA
cagataaacacaatgaaaac

SEQ ID NO: 11028 - RNA, 20 nt, synthetic construct
  source 1..20: mol_type = other RNA
ttttcattgtgtttatctgt

SEQ ID NO: 11029 - RNA, 20 nt, synthetic construct
  source 1..20: mol_type = other RNA
tttcattgtgtttatctgta

SEQ ID NO: 11030 - RNA, 20 nt, synthetic construct
  source 1..20: mol_type = other RNA
catcacttgctataaataga

SEQ ID NO: 11031 - RNA, 20 nt, synthetic construct
  source 1..20: mol_type = other RNA
tactaccagaaatggaaact

SEQ ID NO: 11032 - RNA, 20 nt, synthetic construct
  source 1..20: mol_type = other RNA
tgatgccaagtttccatttc

SEQ ID NO: 11033 - RNA, 20 nt, synthetic construct
  source 1..20: mol_type = other RNA
aactatattactaccagaaa

SEQ ID NO: 11034 - RNA, 20 nt, synthetic construct
  source 1..20: mol_type = other RNA
gattacaggtgtgagcgact

SEQ ID NO: 11035 - RNA, 20 nt, synthetic construct
  source 1..20: mol_type = other RNA
tcccaaagtgttgggattac

SEQ ID NO: 11036 - RNA, 20 nt, synthetic construct
  source 1..20: mol_type = other RNA
ccttagcctcccaaagtgtt

SEQ ID NO: 11037 - RNA, 20 nt, synthetic construct
  source 1..20: mol_type = other RNA
cacctgtaatcccaacactt

SEQ ID NO: 11038 - RNA, 20 nt, synthetic construct
  source 1..20: mol_type = other RNA
accttagcctcccaaagtgt

SEQ ID NO: 11039 - RNA, 20 nt, synthetic construct
  source 1..20: mol_type = other RNA
acctgtaatcccaacacttt

SEQ ID NO: 11040 - RNA, 20 nt, synthetic construct
  source 1..20: mol_type = other RNA
tgtaatcccaacactttggg

SEQ ID NO: 11041 - RNA, 20 nt, synthetic construct
  source 1..20: mol_type = other RNA
cccaacactttgggaggcta

SEQ ID NO: 11042 - RNA, 20 nt, synthetic construct
  source 1..20: mol_type = other RNA
aacactttgggaggctaagg

SEQ ID NO: 11043 - RNA, 20 nt, synthetic construct
  source 1..20: mol_type = other RNA
acactttgggaggctaaggt

SEQ ID NO: 11044 - RNA, 20 nt, synthetic construct
  source 1..20: mol_type = other RNA
ctttgggaggctaaggtggg

SEQ ID NO: 11045 - RNA, 20 nt, synthetic construct
  source 1..20: mol_type = other RNA
tgggtggatcagttgagatc

SEQ ID NO: 11046 - RNA, 20 nt, synthetic construct
  source 1..20: mol_type = other RNA
tcaggagtttgagaccagcc

SEQ ID NO: 11047 - RNA, 20 nt, synthetic construct
  source 1..20: mol_type = other RNA
tttcgccatgttggccaggc

SEQ ID NO: 11048 - RNA, 20 nt, synthetic construct
  source 1..20: mol_type = other RNA
ctcatttcgccatgttggcc

SEQ ID NO: 11049 - RNA, 20 nt, synthetic construct
  source 1..20: mol_type = other RNA
tgagaccagcctggccaaca

SEQ ID NO: 11050 - RNA, 20 nt, synthetic construct
  source 1..20: mol_type = other RNA
ttgacctcatttcgccatgt

SEQ ID NO: 11051 - RNA, 20 nt, synthetic construct
  source 1..20: mol_type = other RNA
ctggccaacatggcgaaatg

SEQ ID NO: 11052 - RNA, 20 nt, synthetic construct
  source 1..20: mol_type = other RNA
aaatgaggtcaagactagcc

SEQ ID NO: 11053 - RNA, 20 nt, synthetic construct
  source 1..20: mol_type = other RNA
gcggtttcgccatgttggcc

SEQ ID NO: 11054 - RNA, 20 nt, synthetic construct
  source 1..20: mol_type = other RNA
caagactagcctggccaaca

SEQ ID NO: 11055 - RNA, 20 nt, synthetic construct
  source 1..20: mol_type = other RNA
gagacgcggtttcgccatgt

SEQ ID NO: 11056 - RNA, 20 nt, synthetic construct
  source 1..20: mol_type = other RNA
gtttgtttttagtagagacg

SEQ ID NO: 11057 - RNA, 20 nt, synthetic construct
  source 1..20: mol_type = other RNA
aacaaaaatacaaaattcgc

SEQ ID NO: 11058 - RNA, 20 nt, synthetic construct
  source 1..20: mol_type = other RNA
acaaaaatacaaaattcgct

SEQ ID NO: 11059 - RNA, 20 nt, synthetic construct
  source 1..20: mol_type = other RNA
aatacaaaattcgctgggca

SEQ ID NO: 11060 - RNA, 20 nt, synthetic construct
  source 1..20: mol_type = other RNA
acaaaattcgctgggcatgg

SEQ ID NO: 11061 - RNA, 20 nt, synthetic construct
  source 1..20: mol_type = other RNA
aattcgctgggcatggtggc

SEQ ID NO: 11062 - RNA, 20 nt, synthetic construct
  source 1..20: mol_type = other RNA
ggcatggtggcaggtgcctg

SEQ ID NO: 11063 - RNA, 20 nt, synthetic construct
  source 1..20: mol_type = other RNA
tcccgagtagctgggacctc

SEQ ID NO: 11064 - RNA, 20 nt, synthetic construct
  source 1..20: mol_type = other RNA
cctcagcctcccgagtagct

SEQ ID NO: 11065 - RNA, 20 nt, synthetic construct
  source 1..20: mol_type = other RNA
tgcctgaggtcccagctact

SEQ ID NO: 11066 - RNA, 20 nt, synthetic construct
  source 1..20: mol_type = other RNA
gcctcagcctcccgagtagc

SEQ ID NO: 11067 - RNA, 20 nt, synthetic construct
  source 1..20: mol_type = other RNA
gcctgaggtcccagctactc

SEQ ID NO: 11068 - RNA, 20 nt, synthetic construct
  source 1..20: mol_type = other RNA
tgaggtcccagctactcggg

SEQ ID NO: 11069 - RNA, 20 nt, synthetic construct
  source 1..20: mol_type = other RNA
cccagctactcgggaggctg

SEQ ID NO: 11070 - RNA, 20 nt, synthetic construct
  source 1..20: mol_type = other RNA
gcagaagaatcgcttgagct

SEQ ID NO: 11071 - RNA, 20 nt, synthetic construct
  source 1..20: mol_type = other RNA
cagaagaatcgcttgagcta

SEQ ID NO: 11072 - RNA, 20 nt, synthetic construct
  source 1..20: mol_type = other RNA
aagaatcgcttgagctaggg

SEQ ID NO: 11073 - RNA, 20 nt, synthetic construct
  source 1..20: mol_type = other RNA
cgcttgagctagggaggcag

SEQ ID NO: 11074 - RNA, 20 nt, synthetic construct
  source 1..20: mol_type = other RNA
atagtgcagtggcgtgatct

SEQ ID NO: 11075 - RNA, 20 nt, synthetic construct
  source 1..20: mol_type = other RNA
tcacctaggctatagtgcag

SEQ ID NO: 11076 - RNA, 20 nt, synthetic construct
  source 1..20: mol_type = other RNA
acgccactgcactatagcct

SEQ ID NO: 11077 - RNA, 20 nt, synthetic construct
  source 1..20: mol_type = other RNA
agagtctcactctgtcacct

SEQ ID NO: 11078 - RNA, 20 nt, synthetic construct
  source 1..20: mol_type = other RNA
tcaaaacattttactttaaa

SEQ ID NO: 11079 - RNA, 20 nt, synthetic construct
  source 1..20: mol_type = other RNA
attaacagttttctttaaat

SEQ ID NO: 11080 - RNA, 20 nt, synthetic construct
  source 1..20: mol_type = other RNA
aagaaaactgttaatagttc

SEQ ID NO: 11081 - RNA, 20 nt, synthetic construct
  source 1..20: mol_type = other RNA
ctgttaatagttcaggtaac

SEQ ID NO: 11082 - RNA, 20 nt, synthetic construct
  source 1..20: mol_type = other RNA
ttcaggtaacaggcagatac

SEQ ID NO: 11083 - RNA, 20 nt, synthetic construct
  source 1..20: mol_type = other RNA
gctgctgacagtgttgtatg

SEQ ID NO: 11084 - RNA, 20 nt, synthetic construct
  source 1..20: mol_type = other RNA
acagtgttgtatgaggtttg

SEQ ID NO: 11085 - RNA, 20 nt, synthetic construct
  source 1..20: mol_type = other RNA
ttgaggattttgatccaagc

SEQ ID NO: 11086 - RNA, 20 nt, synthetic construct
  source 1..20: mol_type = other RNA
tggactgagtgggaccagct

SEQ ID NO: 11087 - RNA, 20 nt, synthetic construct
  source 1..20: mol_type = other RNA
ttctctgctatggactgagt

SEQ ID NO: 11088 - RNA, 20 nt, synthetic construct
  source 1..20: mol_type = other RNA
attctctgctatggactgag

SEQ ID NO: 11089 - RNA, 20 nt, synthetic construct
  source 1..20: mol_type = other RNA
ggccctttcattctctgcta

SEQ ID NO: 11090 - RNA, 20 nt, synthetic construct
  source 1..20: mol_type = other RNA
agtccatagcagagaatgaa

SEQ ID NO: 11091 - RNA, 20 nt, synthetic construct
  source 1..20: mol_type = other RNA
gtccatagcagagaatgaaa

SEQ ID NO: 11092 - RNA, 20 nt, synthetic construct
  source 1..20: mol_type = other RNA
gagaatgaaagggcccagag

SEQ ID NO: 11093 - RNA, 20 nt, synthetic construct
  source 1..20: mol_type = other RNA
agaatgaaagggcccagaga

SEQ ID NO: 11094 - RNA, 20 nt, synthetic construct
  source 1..20: mol_type = other RNA
cagaggtcaccaccctctct

SEQ ID NO: 11095 - RNA, 20 nt, synthetic construct
  source 1..20: mol_type = other RNA
gcagaggtcaccaccctctc

SEQ ID NO: 11096 - RNA, 20 nt, synthetic construct
  source 1..20: mol_type = other RNA
atgaaagggcccagagaggg

SEQ ID NO: 11097 - RNA, 20 nt, synthetic construct
  source 1..20: mol_type = other RNA
cactgtgtgacttcaggcag

SEQ ID NO: 11098 - RNA, 20 nt, synthetic construct
  source 1..20: mol_type = other RNA
tcgactcactgtgtgacttc

SEQ ID NO: 11099 - RNA, 20 nt, synthetic construct
  source 1..20: mol_type = other RNA
tgaagtcacacagtgagtcg

SEQ ID NO: 11100 - RNA, 20 nt, synthetic construct
  source 1..20: mol_type = other RNA
tcacacagtgagtcgaggac

SEQ ID NO: 11101 - RNA, 20 nt, synthetic construct
  source 1..20: mol_type = other RNA
cacacagtgagtcgaggaca

SEQ ID NO: 11102 - RNA, 20 nt, synthetic construct
  source 1..20: mol_type = other RNA
acagtgagtcgaggacaggg

SEQ ID NO: 11103 - RNA, 20 nt, synthetic construct
  source 1..20: mol_type = other RNA
gaggacagggaggtgacccc

SEQ ID NO: 11104 - RNA, 20 nt, synthetic construct
  source 1..20: mol_type = other RNA
gccctacacatagaaacctg

SEQ ID NO: 11105 - RNA, 20 nt, synthetic construct
  source 1..20: mol_type = other RNA
cgccctacacatagaaacct

SEQ ID NO: 11106 - RNA, 20 nt, synthetic construct
  source 1..20: mol_type = other RNA
ccgccctacacatagaaacc

SEQ ID NO: 11107 - RNA, 20 nt, synthetic construct
  source 1..20: mol_type = other RNA
gaccccaggtttctatgtgt

SEQ ID NO: 11108 - RNA, 20 nt, synthetic construct
  source 1..20: mol_type = other RNA
accccaggtttctatgtgta

SEQ ID NO: 11109 - RNA, 20 nt, synthetic construct
  source 1..20: mol_type = other RNA
ccaggtttctatgtgtaggg

SEQ ID NO: 11110 - RNA, 20 nt, synthetic construct
  source 1..20: mol_type = other RNA
caggtttctatgtgtagggc

SEQ ID NO: 11111 - RNA, 20 nt, synthetic construct
  source 1..20: mol_type = other RNA
gtttctatgtgtagggcggg

SEQ ID NO: 11112 - RNA, 20 nt, synthetic construct
  source 1..20: mol_type = other RNA
tgtagggcgggaggatgttc

SEQ ID NO: 11113 - RNA, 20 nt, synthetic construct
  source 1..20: mol_type = other RNA
gtagggcgggaggatgttct

SEQ ID NO: 11114 - RNA, 20 nt, synthetic construct
  source 1..20: mol_type = other RNA
ttctcatttgtcacacactt

SEQ ID NO: 11115 - RNA, 20 nt, synthetic construct
  source 1..20: mol_type = other RNA
tgcaagacacaggagcgaag

SEQ ID NO: 11116 - RNA, 20 nt, synthetic construct
  source 1..20: mol_type = other RNA
ttgcaagacacaggagcgaa

SEQ ID NO: 11117 - RNA, 20 nt, synthetic construct
  source 1..20: mol_type = other RNA
attgcaagacacaggagcga

SEQ ID NO: 11118 - RNA, 20 nt, synthetic construct
  source 1..20: mol_type = other RNA
aggctgccattgcaagacac

SEQ ID NO: 11119 - RNA, 20 nt, synthetic construct
  source 1..20: mol_type = other RNA
ttcgctcctgtgtcttgcaa

SEQ ID NO: 11120 - RNA, 20 nt, synthetic construct
  source 1..20: mol_type = other RNA
gtgtcttgcaatggcagcct

SEQ ID NO: 11121 - RNA, 20 nt, synthetic construct
  source 1..20: mol_type = other RNA
ttttcatttagcgtttgcca

SEQ ID NO: 11122 - RNA, 20 nt, synthetic construct
  source 1..20: mol_type = other RNA
acatgagttcgagtagtaca

SEQ ID NO: 11123 - RNA, 20 nt, synthetic construct
  source 1..20: mol_type = other RNA
cctcctagagttgtttttga

SEQ ID NO: 11124 - RNA, 20 nt, synthetic construct
  source 1..20: mol_type = other RNA
acctcctagagttgtttttg

SEQ ID NO: 11125 - RNA, 20 nt, synthetic construct
  source 1..20: mol_type = other RNA
tatccctcaaaaacaactct

SEQ ID NO: 11126 - RNA, 20 nt, synthetic construct
  source 1..20: mol_type = other RNA
ccctcaaaaacaactctagg

SEQ ID NO: 11127 - RNA, 20 nt, synthetic construct
  source 1..20: mol_type = other RNA
caaaaacaactctaggaggt

SEQ ID NO: 11128 - RNA, 20 nt, synthetic construct
  source 1..20: mol_type = other RNA
aaaaacaactctaggaggta

SEQ ID NO: 11129 - RNA, 20 nt, synthetic construct
  source 1..20: mol_type = other RNA
tctaggaggtagggccaagt

SEQ ID NO: 11130 - RNA, 20 nt, synthetic construct
  source 1..20: mol_type = other RNA
gcagggatgatggtcctact

SEQ ID NO: 11131 - RNA, 20 nt, synthetic construct
  source 1..20: mol_type = other RNA
catgtgaaatgcagggatga

SEQ ID NO: 11132 - RNA, 20 nt, synthetic construct
  source 1..20: mol_type = other RNA
tgagctccatgtgaaatgca

SEQ ID NO: 11133 - RNA, 20 nt, synthetic construct
  source 1..20: mol_type = other RNA
ctgagctccatgtgaaatgc

SEQ ID NO: 11134 - RNA, 20 nt, synthetic construct
  source 1..20: mol_type = other RNA
catcatccctgcatttcaca

SEQ ID NO: 11135 - RNA, 20 nt, synthetic construct
  source 1..20: mol_type = other RNA
atttcacatggagctcagag

SEQ ID NO: 11136 - RNA, 20 nt, synthetic construct
  source 1..20: mol_type = other RNA
gaggttaagcaagccgtgca

SEQ ID NO: 11137 - RNA, 20 nt, synthetic construct
  source 1..20: mol_type = other RNA
atgagctgtgtggccttgca

SEQ ID NO: 11138 - RNA, 20 nt, synthetic construct
  source 1..20: mol_type = other RNA
tctgccatttatgagctgtg

SEQ ID NO: 11139 - RNA, 20 nt, synthetic construct
  source 1..20: mol_type = other RNA
aaggccacacagctcataaa

SEQ ID NO: 11140 - RNA, 20 nt, synthetic construct
  source 1..20: mol_type = other RNA
agctcataaatggcagagcc

SEQ ID NO: 11141 - RNA, 20 nt, synthetic construct
  source 1..20: mol_type = other RNA
ggccacgggggttcaaatcc

SEQ ID NO: 11142 - RNA, 20 nt, synthetic construct
  source 1..20: mol_type = other RNA
agccaggatttgaacccccg

SEQ ID NO: 11143 - RNA, 20 nt, synthetic construct
  source 1..20: mol_type = other RNA
gctttggggtcaggccacgg

SEQ ID NO: 11144 - RNA, 20 nt, synthetic construct
  source 1..20: mol_type = other RNA
ggctttggggtcaggccacg

SEQ ID NO: 11145 - RNA, 20 nt, synthetic construct
  source 1..20: mol_type = other RNA
cggctttggggtcaggccac

SEQ ID NO: 11146 - RNA, 20 nt, synthetic construct
  source 1..20: mol_type = other RNA
tcggctttggggtcaggcca

SEQ ID NO: 11147 - RNA, 20 nt, synthetic construct
  source 1..20: mol_type = other RNA
gtggtttcggctttggggtc

SEQ ID NO: 11148 - RNA, 20 nt, synthetic construct
  source 1..20: mol_type = other RNA
gccgagtggtttcggctttg

SEQ ID NO: 11149 - RNA, 20 nt, synthetic construct
  source 1..20: mol_type = other RNA
tgccgagtggtttcggcttt

SEQ ID NO: 11150 - RNA, 20 nt, synthetic construct
  source 1..20: mol_type = other RNA
gtgccgagtggtttcggctt

SEQ ID NO: 11151 - RNA, 20 nt, synthetic construct
  source 1..20: mol_type = other RNA
cctgcagtgccgagtggttt

SEQ ID NO: 11152 - RNA, 20 nt, synthetic construct
  source 1..20: mol_type = other RNA
accccaaagccgaaaccact

SEQ ID NO: 11153 - RNA, 20 nt, synthetic construct
  source 1..20: mol_type = other RNA
gacgaacctgcagtgccgag

SEQ ID NO: 11154 - RNA, 20 nt, synthetic construct
  source 1..20: mol_type = other RNA
ccgaaaccactcggcactgc

SEQ ID NO: 11155 - RNA, 20 nt, synthetic construct
  source 1..20: mol_type = other RNA
tacccccatctcagagaaaa

SEQ ID NO: 11156 - RNA, 20 nt, synthetic construct
  source 1..20: mol_type = other RNA
atacccccatctcagagaaa

SEQ ID NO: 11157 - RNA, 20 nt, synthetic construct
  source 1..20: mol_type = other RNA
ttcgtcccttttctctgaga

SEQ ID NO: 11158 - RNA, 20 nt, synthetic construct
  source 1..20: mol_type = other RNA
tcgtcccttttctctgagat

SEQ ID NO: 11159 - RNA, 20 nt, synthetic construct
  source 1..20: mol_type = other RNA
cgtcccttttctctgagatg

SEQ ID NO: 11160 - RNA, 20 nt, synthetic construct
  source 1..20: mol_type = other RNA
gtcccttttctctgagatgg

SEQ ID NO: 11161 - RNA, 20 nt, synthetic construct
  source 1..20: mol_type = other RNA
gatgggggtatccaatcttt

SEQ ID NO: 11162 - RNA, 20 nt, synthetic construct
  source 1..20: mol_type = other RNA
gcccagggaagccaaaagat

SEQ ID NO: 11163 - RNA, 20 nt, synthetic construct
  source 1..20: mol_type = other RNA
atccaatcttttggcttccc

SEQ ID NO: 11164 - RNA, 20 nt, synthetic construct
  source 1..20: mol_type = other RNA
tccaatcttttggcttccct

SEQ ID NO: 11165 - RNA, 20 nt, synthetic construct
  source 1..20: mol_type = other RNA
agttcttccactgtggccca

SEQ ID NO: 11166 - RNA, 20 nt, synthetic construct
  source 1..20: mol_type = other RNA
cagttcttccactgtggccc

SEQ ID NO: 11167 - RNA, 20 nt, synthetic construct
  source 1..20: mol_type = other RNA
ttggcttccctgggccacag

SEQ ID NO: 11168 - RNA, 20 nt, synthetic construct
  source 1..20: mol_type = other RNA
cccagacagttcttccactg

SEQ ID NO: 11169 - RNA, 20 nt, synthetic construct
  source 1..20: mol_type = other RNA
gccacagtggaagaactgtc

SEQ ID NO: 11170 - RNA, 20 nt, synthetic construct
  source 1..20: mol_type = other RNA
ccacagtggaagaactgtct

SEQ ID NO: 11171 - RNA, 20 nt, synthetic construct
  source 1..20: mol_type = other RNA
cacagtggaagaactgtctg

SEQ ID NO: 11172 - RNA, 20 nt, synthetic construct
  source 1..20: mol_type = other RNA
tcattagtatattttatatg

SEQ ID NO: 11173 - RNA, 20 nt, synthetic construct
  source 1..20: mol_type = other RNA
aaaaaaaagaattttttttt

SEQ ID NO: 11174 - RNA, 20 nt, synthetic construct
  source 1..20: mol_type = other RNA
tttttttttttttttgagac

SEQ ID NO: 11175 - RNA, 20 nt, synthetic construct
  source 1..20: mol_type = other RNA
ttttttttttttttgagaca

SEQ ID NO: 11176 - RNA, 20 nt, synthetic construct
  source 1..20: mol_type = other RNA
agggtcttgctttgtcaccc

SEQ ID NO: 11177 - RNA, 20 nt, synthetic construct
  source 1..20: mol_type = other RNA
tcttgctttgtcacccaggc

SEQ ID NO: 11178 - RNA, 20 nt, synthetic construct
  source 1..20: mol_type = other RNA
atgccactgccctccagcct

SEQ ID NO: 11179 - RNA, 20 nt, synthetic construct
  source 1..20: mol_type = other RNA
tgctttgtcacccaggctgg

SEQ ID NO: 11180 - RNA, 20 nt, synthetic construct
  source 1..20: mol_type = other RNA
catgccactgccctccagcc

SEQ ID NO: 11181 - RNA, 20 nt, synthetic construct
  source 1..20: mol_type = other RNA
gctttgtcacccaggctgga

SEQ ID NO: 11182 - RNA, 20 nt, synthetic construct
  source 1..20: mol_type = other RNA
tcacccaggctggagggcag

SEQ ID NO: 11183 - RNA, 20 nt, synthetic construct
  source 1..20: mol_type = other RNA
ggagggcagtggcatgatct

SEQ ID NO: 11184 - RNA, 20 nt, synthetic construct
  source 1..20: mol_type = other RNA
tcttggctcactgcagttcc

SEQ ID NO: 11185 - RNA, 20 nt, synthetic construct
  source 1..20: mol_type = other RNA
gcatgagaattgcttgaacc

SEQ ID NO: 11186 - RNA, 20 nt, synthetic construct
  source 1..20: mol_type = other RNA
cccagctactcaggaggctg

SEQ ID NO: 11187 - RNA, 20 nt, synthetic construct
  source 1..20: mol_type = other RNA
tgtagtcccagctactcagg

SEQ ID NO: 11188 - RNA, 20 nt, synthetic construct
  source 1..20: mol_type = other RNA
gcctgtagtcccagctactc

SEQ ID NO: 11189 - RNA, 20 nt, synthetic construct
  source 1..20: mol_type = other RNA
gcctcagcctcctgagtagc

SEQ ID NO: 11190 - RNA, 20 nt, synthetic construct
  source 1..20: mol_type = other RNA
cctcagcctcctgagtagct

SEQ ID NO: 11191 - RNA, 20 nt, synthetic construct
  source 1..20: mol_type = other RNA
tcctgagtagctgggactac

SEQ ID NO: 11192 - RNA, 20 nt, synthetic construct
  source 1..20: mol_type = other RNA
caggcgcatgtcaccatgcc

SEQ ID NO: 11193 - RNA, 20 nt, synthetic construct
  source 1..20: mol_type = other RNA
atacatcaattagccaggca

SEQ ID NO: 11194 - RNA, 20 nt, synthetic construct
  source 1..20: mol_type = other RNA
aaaaaatacatcaattagcc

SEQ ID NO: 11195 - RNA, 20 nt, synthetic construct
  source 1..20: mol_type = other RNA
gatgtattttttagtagaga

SEQ ID NO: 11196 - RNA, 20 nt, synthetic construct
  source 1..20: mol_type = other RNA
atgtattttttagtagagat

SEQ ID NO: 11197 - RNA, 20 nt, synthetic construct
  source 1..20: mol_type = other RNA
tgtattttttagtagagatg

SEQ ID NO: 11198 - RNA, 20 nt, synthetic construct
  source 1..20: mol_type = other RNA
gagatggggtttcaccatgt

SEQ ID NO: 11199 - RNA, 20 nt, synthetic construct
  source 1..20: mol_type = other RNA
agattttagcctggccaaca

SEQ ID NO: 11200 - RNA, 20 nt, synthetic construct
  source 1..20: mol_type = other RNA
ggggtttcaccatgttggcc

SEQ ID NO: 11201 - RNA, 20 nt, synthetic construct
  source 1..20: mol_type = other RNA
aacgttatgagattttagcc

SEQ ID NO: 11202 - RNA, 20 nt, synthetic construct
  source 1..20: mol_type = other RNA
gaaagtttatgaatctgtgt

SEQ ID NO: 11203 - RNA, 20 nt, synthetic construct
  source 1..20: mol_type = other RNA
aaagtttatgaatctgtgtt

SEQ ID NO: 11204 - RNA, 20 nt, synthetic construct
  source 1..20: mol_type = other RNA
gctcaggacggctttgactg

SEQ ID NO: 11205 - RNA, 20 nt, synthetic construct
  source 1..20: mol_type = other RNA
aggctgcatacagctcagga

SEQ ID NO: 11206 - RNA, 20 nt, synthetic construct
  source 1..20: mol_type = other RNA
ctgtaggctgcatacagctc

SEQ ID NO: 11207 - RNA, 20 nt, synthetic construct
  source 1..20: mol_type = other RNA
ctgagctgtatgcagcctac

SEQ ID NO: 11208 - RNA, 20 nt, synthetic construct
  source 1..20: mol_type = other RNA
caatccgtggtgcggcctgt

SEQ ID NO: 11209 - RNA, 20 nt, synthetic construct
  source 1..20: mol_type = other RNA
gcagcctacaggccgcacca

SEQ ID NO: 11210 - RNA, 20 nt, synthetic construct
  source 1..20: mol_type = other RNA
aacttgttcaatccgtggtg

SEQ ID NO: 11211 - RNA, 20 nt, synthetic construct
  source 1..20: mol_type = other RNA
gaagaaacttgttcaatccg

SEQ ID NO: 11212 - RNA, 20 nt, synthetic construct
  source 1..20: mol_type = other RNA
gattgaacaagtttcttcta

SEQ ID NO: 11213 - RNA, 20 nt, synthetic construct
  source 1..20: mol_type = other RNA
tctaaggcatcaagagcccc

SEQ ID NO: 11214 - RNA, 20 nt, synthetic construct
  source 1..20: mol_type = other RNA
ctggggtgcttttcagcctg

SEQ ID NO: 11215 - RNA, 20 nt, synthetic construct
  source 1..20: mol_type = other RNA
tctggggtgcttttcagcct

SEQ ID NO: 11216 - RNA, 20 nt, synthetic construct
  source 1..20: mol_type = other RNA
ctctggggtgcttttcagcc

SEQ ID NO: 11217 - RNA, 20 nt, synthetic construct
  source 1..20: mol_type = other RNA
gctgaaaagcaccccagagc

SEQ ID NO: 11218 - RNA, 20 nt, synthetic construct
  source 1..20: mol_type = other RNA
ttctataagctccagctctg

SEQ ID NO: 11219 - RNA, 20 nt, synthetic construct
  source 1..20: mol_type = other RNA
gttctataagctccagctct

SEQ ID NO: 11220 - RNA, 20 nt, synthetic construct
  source 1..20: mol_type = other RNA
ggttctataagctccagctc

SEQ ID NO: 11221 - RNA, 20 nt, synthetic construct
  source 1..20: mol_type = other RNA
agctggagcttatagaaccc

SEQ ID NO: 11222 - RNA, 20 nt, synthetic construct
  source 1..20: mol_type = other RNA
gctggagcttatagaaccca

SEQ ID NO: 11223 - RNA, 20 nt, synthetic construct
  source 1..20: mol_type = other RNA
gttggagaacctgctgccct

SEQ ID NO: 11224 - RNA, 20 nt, synthetic construct
  source 1..20: mol_type = other RNA
ggttggagaacctgctgccc

SEQ ID NO: 11225 - RNA, 20 nt, synthetic construct
  source 1..20: mol_type = other RNA
cttatagaacccagggcagc

SEQ ID NO: 11226 - RNA, 20 nt, synthetic construct
  source 1..20: mol_type = other RNA
ctctgatgatgtcagaaggt

SEQ ID NO: 11227 - RNA, 20 nt, synthetic construct
  source 1..20: mol_type = other RNA
tgtgctctgatgatgtcaga

SEQ ID NO: 11228 - RNA, 20 nt, synthetic construct
  source 1..20: mol_type = other RNA
aaagggggaaaaaaatctag

SEQ ID NO: 11229 - RNA, 20 nt, synthetic construct
  source 1..20: mol_type = other RNA
aggttacagtttcagaaagg

SEQ ID NO: 11230 - RNA, 20 nt, synthetic construct
  source 1..20: mol_type = other RNA
aaggttacagtttcagaaag

SEQ ID NO: 11231 - RNA, 20 nt, synthetic construct
  source 1..20: mol_type = other RNA
aaaggttacagtttcagaaa

SEQ ID NO: 11232 - RNA, 20 nt, synthetic construct
  source 1..20: mol_type = other RNA
gaaaggttacagtttcagaa

SEQ ID NO: 11233 - RNA, 20 nt, synthetic construct
  source 1..20: mol_type = other RNA
tggggaatggctggaatgaa

SEQ ID NO: 11234 - RNA, 20 nt, synthetic construct
  source 1..20: mol_type = other RNA
gtccagctctggggaatggc

SEQ ID NO: 11235 - RNA, 20 nt, synthetic construct
  source 1..20: mol_type = other RNA
ctctgtccagctctggggaa

SEQ ID NO: 11236 - RNA, 20 nt, synthetic construct
  source 1..20: mol_type = other RNA
ttccagccattccccagagc

SEQ ID NO: 11237 - RNA, 20 nt, synthetic construct
  source 1..20: mol_type = other RNA
acgtcctctgtccagctctg

SEQ ID NO: 11238 - RNA, 20 nt, synthetic construct
  source 1..20: mol_type = other RNA
cacgtcctctgtccagctct

SEQ ID NO: 11239 - RNA, 20 nt, synthetic construct
  source 1..20: mol_type = other RNA
ccacgtcctctgtccagctc

SEQ ID NO: 11240 - RNA, 20 nt, synthetic construct
  source 1..20: mol_type = other RNA
cattccccagagctggacag

SEQ ID NO: 11241 - RNA, 20 nt, synthetic construct
  source 1..20: mol_type = other RNA
ccagagctggacagaggacg

SEQ ID NO: 11242 - RNA, 20 nt, synthetic construct
  source 1..20: mol_type = other RNA
agctggacagaggacgtggc

SEQ ID NO: 11243 - RNA, 20 nt, synthetic construct
  source 1..20: mol_type = other RNA
ggacagaggacgtggctggc

SEQ ID NO: 11244 - RNA, 20 nt, synthetic construct
  source 1..20: mol_type = other RNA
agaggacgtggctggctggc

SEQ ID NO: 11245 - RNA, 20 nt, synthetic construct
  source 1..20: mol_type = other RNA
tctgtagtcagaatgacagt

SEQ ID NO: 11246 - RNA, 20 nt, synthetic construct
  source 1..20: mol_type = other RNA
ctgtagtcagaatgacagtt

SEQ ID NO: 11247 - RNA, 20 nt, synthetic construct
  source 1..20: mol_type = other RNA
taagacattgcttcacgaag

SEQ ID NO: 11248 - RNA, 20 nt, synthetic construct
  source 1..20: mol_type = other RNA
ctaagacattgcttcacgaa

SEQ ID NO: 11249 - RNA, 20 nt, synthetic construct
  source 1..20: mol_type = other RNA
gctaagacattgcttcacga

SEQ ID NO: 11250 - RNA, 20 nt, synthetic construct
  source 1..20: mol_type = other RNA
aactctgcagagaagctgcc

SEQ ID NO: 11251 - RNA, 20 nt, synthetic construct
  source 1..20: mol_type = other RNA
gcagagaagctgcctggttc

SEQ ID NO: 11252 - RNA, 20 nt, synthetic construct
  source 1..20: mol_type = other RNA
cttaagccacatcctgaacc

SEQ ID NO: 11253 - RNA, 20 nt, synthetic construct
  source 1..20: mol_type = other RNA
aagctgcctggttcaggatg

SEQ ID NO: 11254 - RNA, 20 nt, synthetic construct
  source 1..20: mol_type = other RNA
atgtggcttaagtaagaaga

SEQ ID NO: 11255 - RNA, 20 nt, synthetic construct
  source 1..20: mol_type = other RNA
cttaagtaagaagatggccc

SEQ ID NO: 11256 - RNA, 20 nt, synthetic construct
  source 1..20: mol_type = other RNA
ccagtgcgcgtaaaacgcca

SEQ ID NO: 11257 - RNA, 20 nt, synthetic construct
  source 1..20: mol_type = other RNA
accagtgcgcgtaaaacgcc

SEQ ID NO: 11258 - RNA, 20 nt, synthetic construct
  source 1..20: mol_type = other RNA
ccctggcgttttacgcgcac

SEQ ID NO: 11259 - RNA, 20 nt, synthetic construct
  source 1..20: mol_type = other RNA
tggcgttttacgcgcactgg

SEQ ID NO: 11260 - RNA, 20 nt, synthetic construct
  source 1..20: mol_type = other RNA
ggcgttttacgcgcactggt

SEQ ID NO: 11261 - RNA, 20 nt, synthetic construct
  source 1..20: mol_type = other RNA
tttacgcgcactggtgggtg

SEQ ID NO: 11262 - RNA, 20 nt, synthetic construct
  source 1..20: mol_type = other RNA
ggtgggtgaggctctgaaag

SEQ ID NO: 11263 - RNA, 20 nt, synthetic construct
  source 1..20: mol_type = other RNA
gaggctctgaaagtggtaga

SEQ ID NO: 11264 - RNA, 20 nt, synthetic construct
  source 1..20: mol_type = other RNA
aggctctgaaagtggtagaa

SEQ ID NO: 11265 - RNA, 20 nt, synthetic construct
  source 1..20: mol_type = other RNA
acagcgggcagctgaactct

SEQ ID NO: 11266 - RNA, 20 nt, synthetic construct
  source 1..20: mol_type = other RNA
gccctgaggagcaggacagc

SEQ ID NO: 11267 - RNA, 20 nt, synthetic construct
  source 1..20: mol_type = other RNA
tgccctgaggagcaggacag

SEQ ID NO: 11268 - RNA, 20 nt, synthetic construct
  source 1..20: mol_type = other RNA
cagcatttgccctgaggagc

SEQ ID NO: 11269 - RNA, 20 nt, synthetic construct
  source 1..20: mol_type = other RNA
tgcccgctgtcctgctcctc

SEQ ID NO: 11270 - RNA, 20 nt, synthetic construct
  source 1..20: mol_type = other RNA
gcccgctgtcctgctcctca

SEQ ID NO: 11271 - RNA, 20 nt, synthetic construct
  source 1..20: mol_type = other RNA
atctcacagcatttgccctg

SEQ ID NO: 11272 - RNA, 20 nt, synthetic construct
  source 1..20: mol_type = other RNA
gaaccacaatcagcacagac

SEQ ID NO: 11273 - RNA, 20 nt, synthetic construct
  source 1..20: mol_type = other RNA
tagcctgtctgtgctgattg

SEQ ID NO: 11274 - RNA, 20 nt, synthetic construct
  source 1..20: mol_type = other RNA
attgtggttctgccccttcc

SEQ ID NO: 11275 - RNA, 20 nt, synthetic construct
  source 1..20: mol_type = other RNA
gaggtcacacagccaggaag

SEQ ID NO: 11276 - RNA, 20 nt, synthetic construct
  source 1..20: mol_type = other RNA
tgaggtcacacagccaggaa

SEQ ID NO: 11277 - RNA, 20 nt, synthetic construct
  source 1..20: mol_type = other RNA
ctgaggtcacacagccagga

SEQ ID NO: 11278 - RNA, 20 nt, synthetic construct
  source 1..20: mol_type = other RNA
ttgtctgaggtcacacagcc

SEQ ID NO: 11279 - RNA, 20 nt, synthetic construct
  source 1..20: mol_type = other RNA
gagggtgggtgacttgtctg

SEQ ID NO: 11280 - RNA, 20 nt, synthetic construct
  source 1..20: mol_type = other RNA
gaaactggcccagagagggt

SEQ ID NO: 11281 - RNA, 20 nt, synthetic construct
  source 1..20: mol_type = other RNA
ggaaactggcccagagaggg

SEQ ID NO: 11282 - RNA, 20 nt, synthetic construct
  source 1..20: mol_type = other RNA
gacaagtcacccaccctctc

SEQ ID NO: 11283 - RNA, 20 nt, synthetic construct
  source 1..20: mol_type = other RNA
acaagtcacccaccctctct

SEQ ID NO: 11284 - RNA, 20 nt, synthetic construct
  source 1..20: mol_type = other RNA
tgaggaaactggcccagaga

SEQ ID NO: 11285 - RNA, 20 nt, synthetic construct
  source 1..20: mol_type = other RNA
atgaggaaactggcccagag

SEQ ID NO: 11286 - RNA, 20 nt, synthetic construct
  source 1..20: mol_type = other RNA
ccttttccagatgaggaaac

SEQ ID NO: 11287 - RNA, 20 nt, synthetic construct
  source 1..20: mol_type = other RNA
tctgggccagtttcctcatc

SEQ ID NO: 11288 - RNA, 20 nt, synthetic construct
  source 1..20: mol_type = other RNA
actgtccccttttccagatg

SEQ ID NO: 11289 - RNA, 20 nt, synthetic construct
  source 1..20: mol_type = other RNA
ccagtttcctcatctggaaa

SEQ ID NO: 11290 - RNA, 20 nt, synthetic construct
  source 1..20: mol_type = other RNA
cagtttcctcatctggaaaa

SEQ ID NO: 11291 - RNA, 20 nt, synthetic construct
  source 1..20: mol_type = other RNA
agtttcctcatctggaaaag

SEQ ID NO: 11292 - RNA, 20 nt, synthetic construct
  source 1..20: mol_type = other RNA
cacaaacagcccaatgtggt

SEQ ID NO: 11293 - RNA, 20 nt, synthetic construct
  source 1..20: mol_type = other RNA
ggggacagtgcccaccacat

SEQ ID NO: 11294 - RNA, 20 nt, synthetic construct
  source 1..20: mol_type = other RNA
acacaaacagcccaatgtgg

SEQ ID NO: 11295 - RNA, 20 nt, synthetic construct
  source 1..20: mol_type = other RNA
gggacagtgcccaccacatt

SEQ ID NO: 11296 - RNA, 20 nt, synthetic construct
  source 1..20: mol_type = other RNA
tggacacaaacagcccaatg

SEQ ID NO: 11297 - RNA, 20 nt, synthetic construct
  source 1..20: mol_type = other RNA
cattgggctgtttgtgtcca

SEQ ID NO: 11298 - RNA, 20 nt, synthetic construct
  source 1..20: mol_type = other RNA
gggtattgtcaggcactcca

SEQ ID NO: 11299 - RNA, 20 nt, synthetic construct
  source 1..20: mol_type = other RNA
cgtgtgtgctgggtattgtc

SEQ ID NO: 11300 - RNA, 20 nt, synthetic construct
  source 1..20: mol_type = other RNA
actgatgtctcgtgtgtgct

SEQ ID NO: 11301 - RNA, 20 nt, synthetic construct
  source 1..20: mol_type = other RNA
tactgatgtctcgtgtgtgc

SEQ ID NO: 11302 - RNA, 20 nt, synthetic construct
  source 1..20: mol_type = other RNA
cacacacgagacatcagtac

SEQ ID NO: 11303 - RNA, 20 nt, synthetic construct
  source 1..20: mol_type = other RNA
acacacgagacatcagtaca

SEQ ID NO: 11304 - RNA, 20 nt, synthetic construct
  source 1..20: mol_type = other RNA
cacgagacatcagtacaggg

SEQ ID NO: 11305 - RNA, 20 nt, synthetic construct
  source 1..20: mol_type = other RNA
caggtggggctaaggaggga

SEQ ID NO: 11306 - RNA, 20 nt, synthetic construct
  source 1..20: mol_type = other RNA
ggaacaggtggggctaagga

SEQ ID NO: 11307 - RNA, 20 nt, synthetic construct
  source 1..20: mol_type = other RNA
gggaacaggtggggctaagg

SEQ ID NO: 11308 - RNA, 20 nt, synthetic construct
  source 1..20: mol_type = other RNA
cctgggaacaggtggggcta

SEQ ID NO: 11309 - RNA, 20 nt, synthetic construct
  source 1..20: mol_type = other RNA
tttctacctgggaacaggtg

SEQ ID NO: 11310 - RNA, 20 nt, synthetic construct
  source 1..20: mol_type = other RNA
gtttctacctgggaacaggt

SEQ ID NO: 11311 - RNA, 20 nt, synthetic construct
  source 1..20: mol_type = other RNA
ggtttctacctgggaacagg

SEQ ID NO: 11312 - RNA, 20 nt, synthetic construct
  source 1..20: mol_type = other RNA
ccttagccccacctgttccc

SEQ ID NO: 11313 - RNA, 20 nt, synthetic construct
  source 1..20: mol_type = other RNA
attggtttctacctgggaac

SEQ ID NO: 11314 - RNA, 20 nt, synthetic construct
  source 1..20: mol_type = other RNA
gccggtattggtttctacct

SEQ ID NO: 11315 - RNA, 20 nt, synthetic construct
  source 1..20: mol_type = other RNA
tgccggtattggtttctacc

SEQ ID NO: 11316 - RNA, 20 nt, synthetic construct
  source 1..20: mol_type = other RNA
tcccaggtagaaaccaatac

SEQ ID NO: 11317 - RNA, 20 nt, synthetic construct
  source 1..20: mol_type = other RNA
agaaggttccctgccggtat

SEQ ID NO: 11318 - RNA, 20 nt, synthetic construct
  source 1..20: mol_type = other RNA
aggtagaaaccaataccggc

SEQ ID NO: 11319 - RNA, 20 nt, synthetic construct
  source 1..20: mol_type = other RNA
ggtagaaaccaataccggca

SEQ ID NO: 11320 - RNA, 20 nt, synthetic construct
  source 1..20: mol_type = other RNA
gccttgagaaggttccctgc

SEQ ID NO: 11321 - RNA, 20 nt, synthetic construct
  source 1..20: mol_type = other RNA
accggcagggaaccttctca

SEQ ID NO: 11322 - RNA, 20 nt, synthetic construct
  source 1..20: mol_type = other RNA
gaaggcccctagccttgaga

SEQ ID NO: 11323 - RNA, 20 nt, synthetic construct
  source 1..20: mol_type = other RNA
cagggaaccttctcaaggct

SEQ ID NO: 11324 - RNA, 20 nt, synthetic construct
  source 1..20: mol_type = other RNA
agggaaccttctcaaggcta

SEQ ID NO: 11325 - RNA, 20 nt, synthetic construct
  source 1..20: mol_type = other RNA
gggaaccttctcaaggctag

SEQ ID NO: 11326 - RNA, 20 nt, synthetic construct
  source 1..20: mol_type = other RNA
aaagtgctgctgctttcaga

SEQ ID NO: 11327 - RNA, 20 nt, synthetic construct
  source 1..20: mol_type = other RNA
gaaggcaaggtctttgaagg

SEQ ID NO: 11328 - RNA, 20 nt, synthetic construct
  source 1..20: mol_type = other RNA
ctagaaggcaaggtctttga

SEQ ID NO: 11329 - RNA, 20 nt, synthetic construct
  source 1..20: mol_type = other RNA
caatgggtttctagaaggca

SEQ ID NO: 11330 - RNA, 20 nt, synthetic construct
  source 1..20: mol_type = other RNA
atgagcaatgggtttctaga

SEQ ID NO: 11331 - RNA, 20 nt, synthetic construct
  source 1..20: mol_type = other RNA
tggagaaaggaatgagcaat

SEQ ID NO: 11332 - RNA, 20 nt, synthetic construct
  source 1..20: mol_type = other RNA
atggagaaaggaatgagcaa

SEQ ID NO: 11333 - RNA, 20 nt, synthetic construct
  source 1..20: mol_type = other RNA
attttttggtacatggagaa

SEQ ID NO: 11334 - RNA, 20 nt, synthetic construct
  source 1..20: mol_type = other RNA
ttaattgattttttggtaca

SEQ ID NO: 11335 - RNA, 20 nt, synthetic construct
  source 1..20: mol_type = other RNA
agccactttaattgattttt

SEQ ID NO: 11336 - RNA, 20 nt, synthetic construct
  source 1..20: mol_type = other RNA
taccaaaaaatcaattaaag

SEQ ID NO: 11337 - RNA, 20 nt, synthetic construct
  source 1..20: mol_type = other RNA
atggctgcgtgagtagggga

SEQ ID NO: 11338 - RNA, 20 nt, synthetic construct
  source 1..20: mol_type = other RNA
aatggctgcgtgagtagggg

SEQ ID NO: 11339 - RNA, 20 nt, synthetic construct
  source 1..20: mol_type = other RNA
cagaatggctgcgtgagtag

SEQ ID NO: 11340 - RNA, 20 nt, synthetic construct
  source 1..20: mol_type = other RNA
tcagaatggctgcgtgagta

SEQ ID NO: 11341 - RNA, 20 nt, synthetic construct
  source 1..20: mol_type = other RNA
atcagaatggctgcgtgagt

SEQ ID NO: 11342 - RNA, 20 nt, synthetic construct
  source 1..20: mol_type = other RNA
accagcgtggaggatcagaa

SEQ ID NO: 11343 - RNA, 20 nt, synthetic construct
  source 1..20: mol_type = other RNA
gccattctgatcctccacgc

SEQ ID NO: 11344 - RNA, 20 nt, synthetic construct
  source 1..20: mol_type = other RNA
atagcctgtcaccagcgtgg

SEQ ID NO: 11345 - RNA, 20 nt, synthetic construct
  source 1..20: mol_type = other RNA
cacatagcctgtcaccagcg

SEQ ID NO: 11346 - RNA, 20 nt, synthetic construct
  source 1..20: mol_type = other RNA
tgatcctccacgctggtgac

SEQ ID NO: 11347 - RNA, 20 nt, synthetic construct
  source 1..20: mol_type = other RNA
cacgctggtgacaggctatg

SEQ ID NO: 11348 - RNA, 20 nt, synthetic construct
  source 1..20: mol_type = other RNA
ctggtgacaggctatgtggc

SEQ ID NO: 11349 - RNA, 20 nt, synthetic construct
  source 1..20: mol_type = other RNA
gtgacaggctatgtggcagg

SEQ ID NO: 11350 - RNA, 20 nt, synthetic construct
  source 1..20: mol_type = other RNA
tgacaggctatgtggcagga

SEQ ID NO: 11351 - RNA, 20 nt, synthetic construct
  source 1..20: mol_type = other RNA
catgccttcattctgagata

SEQ ID NO: 11352 - RNA, 20 nt, synthetic construct
  source 1..20: mol_type = other RNA
tctaccttatctcagaatga

SEQ ID NO: 11353 - RNA, 20 nt, synthetic construct
  source 1..20: mol_type = other RNA
cttatctcagaatgaaggca

SEQ ID NO: 11354 - RNA, 20 nt, synthetic construct
  source 1..20: mol_type = other RNA
tctcagaatgaaggcatggc

SEQ ID NO: 11355 - RNA, 20 nt, synthetic construct
  source 1..20: mol_type = other RNA
ctcagaatgaaggcatggct

SEQ ID NO: 11356 - RNA, 20 nt, synthetic construct
  source 1..20: mol_type = other RNA
tcagaatgaaggcatggctg

SEQ ID NO: 11357 - RNA, 20 nt, synthetic construct
  source 1..20: mol_type = other RNA
atgaaggcatggctggggtc

SEQ ID NO: 11358 - RNA, 20 nt, synthetic construct
  source 1..20: mol_type = other RNA
gctggggtctggctgtctcc

SEQ ID NO: 11359 - RNA, 20 nt, synthetic construct
  source 1..20: mol_type = other RNA
ggggtctggctgtctcctgg

SEQ ID NO: 11360 - RNA, 20 nt, synthetic construct
  source 1..20: mol_type = other RNA
tctggctgtctcctggtggc

SEQ ID NO: 11361 - RNA, 20 nt, synthetic construct
  source 1..20: mol_type = other RNA
tctgtctccttccggccacc

SEQ ID NO: 11362 - RNA, 20 nt, synthetic construct
  source 1..20: mol_type = other RNA
gctgtctcctggtggccgga

SEQ ID NO: 11363 - RNA, 20 nt, synthetic construct
  source 1..20: mol_type = other RNA
ctttgccgtctgtctccttc

SEQ ID NO: 11364 - RNA, 20 nt, synthetic construct
  source 1..20: mol_type = other RNA
ggtggccggaaggagacaga

SEQ ID NO: 11365 - RNA, 20 nt, synthetic construct
  source 1..20: mol_type = other RNA
cggaaggagacagacggcaa

SEQ ID NO: 11366 - RNA, 20 nt, synthetic construct
  source 1..20: mol_type = other RNA
acatggacctgtgcagagac

SEQ ID NO: 11367 - RNA, 20 nt, synthetic construct
  source 1..20: mol_type = other RNA
gaagctgcctgtctctgcac

SEQ ID NO: 11368 - RNA, 20 nt, synthetic construct
  source 1..20: mol_type = other RNA
gttggctttcctcagggaca

SEQ ID NO: 11369 - RNA, 20 nt, synthetic construct
  source 1..20: mol_type = other RNA
tgcacaggtccatgtccctg

SEQ ID NO: 11370 - RNA, 20 nt, synthetic construct
  source 1..20: mol_type = other RNA
tgtgacgttggctttcctca

SEQ ID NO: 11371 - RNA, 20 nt, synthetic construct
  source 1..20: mol_type = other RNA
ctgtgacgttggctttcctc

SEQ ID NO: 11372 - RNA, 20 nt, synthetic construct
  source 1..20: mol_type = other RNA
tcatcatttctctgtgacgt

SEQ ID NO: 11373 - RNA, 20 nt, synthetic construct
  source 1..20: mol_type = other RNA
cgaagccaggtttgagaaag

SEQ ID NO: 11374 - RNA, 20 nt, synthetic construct
  source 1..20: mol_type = other RNA
gatgaccactttctcaaacc

SEQ ID NO: 11375 - RNA, 20 nt, synthetic construct
  source 1..20: mol_type = other RNA
cactttctcaaacctggctt

SEQ ID NO: 11376 - RNA, 20 nt, synthetic construct
  source 1..20: mol_type = other RNA
caacgtgcaaatccgaagcc

SEQ ID NO: 11377 - RNA, 20 nt, synthetic construct
  source 1..20: mol_type = other RNA
ctggcttcggatttgcacgt

SEQ ID NO: 11378 - RNA, 20 nt, synthetic construct
  source 1..20: mol_type = other RNA
agcccgctgctgatcagctt

SEQ ID NO: 11379 - RNA, 20 nt, synthetic construct
  source 1..20: mol_type = other RNA
ctgccaaagctgatcagcag

SEQ ID NO: 11380 - RNA, 20 nt, synthetic construct
  source 1..20: mol_type = other RNA
tgccaaagctgatcagcagc

SEQ ID NO: 11381 - RNA, 20 nt, synthetic construct
  source 1..20: mol_type = other RNA
gcgggctttgtgaagatgcc

SEQ ID NO: 11382 - RNA, 20 nt, synthetic construct
  source 1..20: mol_type = other RNA
ctggaggcacgtggtagacc

SEQ ID NO: 11383 - RNA, 20 nt, synthetic construct
  source 1..20: mol_type = other RNA
cgtgaccagctggaggcacg

SEQ ID NO: 11384 - RNA, 20 nt, synthetic construct
  source 1..20: mol_type = other RNA
gtctaccacgtgcctccagc

SEQ ID NO: 11385 - RNA, 20 nt, synthetic construct
  source 1..20: mol_type = other RNA
tcttgggcgtgaccagctgg

SEQ ID NO: 11386 - RNA, 20 nt, synthetic construct
  source 1..20: mol_type = other RNA
gagtcttgggcgtgaccagc

SEQ ID NO: 11387 - RNA, 20 nt, synthetic construct
  source 1..20: mol_type = other RNA
cagagggctcagggagtctt

SEQ ID NO: 11388 - RNA, 20 nt, synthetic construct
  source 1..20: mol_type = other RNA
ccagagggctcagggagtct

SEQ ID NO: 11389 - RNA, 20 nt, synthetic construct
  source 1..20: mol_type = other RNA
ctgcccttccagagggctca

SEQ ID NO: 11390 - RNA, 20 nt, synthetic construct
  source 1..20: mol_type = other RNA
gctgcccttccagagggctc

SEQ ID NO: 11391 - RNA, 20 nt, synthetic construct
  source 1..20: mol_type = other RNA
ccaagactccctgagccctc

SEQ ID NO: 11392 - RNA, 20 nt, synthetic construct
  source 1..20: mol_type = other RNA
gactccctgagccctctgga

SEQ ID NO: 11393 - RNA, 20 nt, synthetic construct
  source 1..20: mol_type = other RNA
gcaagtgctgcccttccaga

SEQ ID NO: 11394 - RNA, 20 nt, synthetic construct
  source 1..20: mol_type = other RNA
actccctgagccctctggaa

SEQ ID NO: 11395 - RNA, 20 nt, synthetic construct
  source 1..20: mol_type = other RNA
ggcaagtgctgcccttccag

SEQ ID NO: 11396 - RNA, 20 nt, synthetic construct
  source 1..20: mol_type = other RNA
aggacctggagggaggcact

SEQ ID NO: 11397 - RNA, 20 nt, synthetic construct
  source 1..20: mol_type = other RNA
caggacctggagggaggcac

SEQ ID NO: 11398 - RNA, 20 nt, synthetic construct
  source 1..20: mol_type = other RNA
cttgcccagtgcctccctcc

SEQ ID NO: 11399 - RNA, 20 nt, synthetic construct
  source 1..20: mol_type = other RNA
atgtggcaggacctggaggg

SEQ ID NO: 11400 - RNA, 20 nt, synthetic construct
  source 1..20: mol_type = other RNA
tggatgtggcaggacctgga

SEQ ID NO: 11401 - RNA, 20 nt, synthetic construct
  source 1..20: mol_type = other RNA
ttggatgtggcaggacctgg

SEQ ID NO: 11402 - RNA, 20 nt, synthetic construct
  source 1..20: mol_type = other RNA
ttcttggatgtggcaggacc

SEQ ID NO: 11403 - RNA, 20 nt, synthetic construct
  source 1..20: mol_type = other RNA
aggtggttcttggatgtggc

SEQ ID NO: 11404 - RNA, 20 nt, synthetic construct
  source 1..20: mol_type = other RNA
gtccaggtggttcttggatg

SEQ ID NO: 11405 - RNA, 20 nt, synthetic construct
  source 1..20: mol_type = other RNA
ataatagtccaggtggttct

SEQ ID NO: 11406 - RNA, 20 nt, synthetic construct
  source 1..20: mol_type = other RNA
tgccacatccaagaaccacc

SEQ ID NO: 11407 - RNA, 20 nt, synthetic construct
  source 1..20: mol_type = other RNA
taagtaaataatagtccagg

SEQ ID NO: 11408 - RNA, 20 nt, synthetic construct
  source 1..20: mol_type = other RNA
tactaagtaaataatagtcc

SEQ ID NO: 11409 - RNA, 20 nt, synthetic construct
  source 1..20: mol_type = other RNA
ttggagtttaaaaagtacat

SEQ ID NO: 11410 - RNA, 20 nt, synthetic construct
  source 1..20: mol_type = other RNA
aaatgatcttattaaaaaat

SEQ ID NO: 11411 - RNA, 20 nt, synthetic construct
  source 1..20: mol_type = other RNA
ctactgctttgggtgttata

SEQ ID NO: 11412 - RNA, 20 nt, synthetic construct
  source 1..20: mol_type = other RNA
atgacaaattctactgcttt

SEQ ID NO: 11413 - RNA, 20 nt, synthetic construct
  source 1..20: mol_type = other RNA
tatgacaaattctactgctt

SEQ ID NO: 11414 - RNA, 20 nt, synthetic construct
  source 1..20: mol_type = other RNA
tagaatttgtcatacacaga

SEQ ID NO: 11415 - RNA, 20 nt, synthetic construct
  source 1..20: mol_type = other RNA
tgctaaaaatacaatgaaaa

SEQ ID NO: 11416 - RNA, 20 nt, synthetic construct
  source 1..20: mol_type = other RNA
aatacaatgaaaatggaacc

SEQ ID NO: 11417 - RNA, 20 nt, synthetic construct
  source 1..20: mol_type = other RNA
gggtatcaagctagacttcc

SEQ ID NO: 11418 - RNA, 20 nt, synthetic construct
  source 1..20: mol_type = other RNA
gaagtctagcttgataccct

SEQ ID NO: 11419 - RNA, 20 nt, synthetic construct
  source 1..20: mol_type = other RNA
ggctcagttatacaggccaa

SEQ ID NO: 11420 - RNA, 20 nt, synthetic construct
  source 1..20: mol_type = other RNA
aggctcagttatacaggcca

SEQ ID NO: 11421 - RNA, 20 nt, synthetic construct
  source 1..20: mol_type = other RNA
ggcacaaggctcagttatac

SEQ ID NO: 11422 - RNA, 20 nt, synthetic construct
  source 1..20: mol_type = other RNA
ttgcccttttaactggcaca

SEQ ID NO: 11423 - RNA, 20 nt, synthetic construct
  source 1..20: mol_type = other RNA
tgagccttgtgccagttaaa

SEQ ID NO: 11424 - RNA, 20 nt, synthetic construct
  source 1..20: mol_type = other RNA
tactgctttgcccttttaac

SEQ ID NO: 11425 - RNA, 20 nt, synthetic construct
  source 1..20: mol_type = other RNA
gagccttgtgccagttaaaa

SEQ ID NO: 11426 - RNA, 20 nt, synthetic construct
  source 1..20: mol_type = other RNA
agttaaaagggcaaagcagt

SEQ ID NO: 11427 - RNA, 20 nt, synthetic construct
  source 1..20: mol_type = other RNA
gggcaaagcagtaggtgctc

SEQ ID NO: 11428 - RNA, 20 nt, synthetic construct
  source 1..20: mol_type = other RNA
ggcaaagcagtaggtgctca

SEQ ID NO: 11429 - RNA, 20 nt, synthetic construct
  source 1..20: mol_type = other RNA
gcaaagcagtaggtgctcag

SEQ ID NO: 11430 - RNA, 20 nt, synthetic construct
  source 1..20: mol_type = other RNA
caaagcagtaggtgctcagg

SEQ ID NO: 11431 - RNA, 20 nt, synthetic construct
  source 1..20: mol_type = other RNA
agtaggtgctcagggggtgt

SEQ ID NO: 11432 - RNA, 20 nt, synthetic construct
  source 1..20: mol_type = other RNA
gtaggtgctcagggggtgtc

SEQ ID NO: 11433 - RNA, 20 nt, synthetic construct
  source 1..20: mol_type = other RNA
taggtgctcagggggtgtcg

SEQ ID NO: 11434 - RNA, 20 nt, synthetic construct
  source 1..20: mol_type = other RNA
gcggatcagatcagctctca

SEQ ID NO: 11435 - RNA, 20 nt, synthetic construct
  source 1..20: mol_type = other RNA
agcggatcagatcagctctc

SEQ ID NO: 11436 - RNA, 20 nt, synthetic construct
  source 1..20: mol_type = other RNA
cggtagtgaatacgcagcag

SEQ ID NO: 11437 - RNA, 20 nt, synthetic construct
  source 1..20: mol_type = other RNA
ctgcgtattcactaccgccc

SEQ ID NO: 11438 - RNA, 20 nt, synthetic construct
  source 1..20: mol_type = other RNA
tgcgtattcactaccgccct

SEQ ID NO: 11439 - RNA, 20 nt, synthetic construct
  source 1..20: mol_type = other RNA
ctgctggaggcgtcccaggg

SEQ ID NO: 11440 - RNA, 20 nt, synthetic construct
  source 1..20: mol_type = other RNA
ggtctgctggaggcgtccca

SEQ ID NO: 11441 - RNA, 20 nt, synthetic construct
  source 1..20: mol_type = other RNA
tggtctgctggaggcgtccc

SEQ ID NO: 11442 - RNA, 20 nt, synthetic construct
  source 1..20: mol_type = other RNA
ccagtgaggtggtctgctgg

SEQ ID NO: 11443 - RNA, 20 nt, synthetic construct
  source 1..20: mol_type = other RNA
cccccagtgaggtggtctgc

SEQ ID NO: 11444 - RNA, 20 nt, synthetic construct
  source 1..20: mol_type = other RNA
cctccagcagaccacctcac

SEQ ID NO: 11445 - RNA, 20 nt, synthetic construct
  source 1..20: mol_type = other RNA
tgatgtttcccccagtgagg

SEQ ID NO: 11446 - RNA, 20 nt, synthetic construct
  source 1..20: mol_type = other RNA
ctccagcagaccacctcact

SEQ ID NO: 11447 - RNA, 20 nt, synthetic construct
  source 1..20: mol_type = other RNA
tccagcagaccacctcactg

SEQ ID NO: 11448 - RNA, 20 nt, synthetic construct
  source 1..20: mol_type = other RNA
ccagcagaccacctcactgg

SEQ ID NO: 11449 - RNA, 20 nt, synthetic construct
  source 1..20: mol_type = other RNA
tcctgatgtttcccccagtg

SEQ ID NO: 11450 - RNA, 20 nt, synthetic construct
  source 1..20: mol_type = other RNA
acctcactgggggaaacatc

SEQ ID NO: 11451 - RNA, 20 nt, synthetic construct
  source 1..20: mol_type = other RNA
ggggaaacatcaggacagcg

SEQ ID NO: 11452 - RNA, 20 nt, synthetic construct
  source 1..20: mol_type = other RNA
aacatcaggacagcgtggcc

SEQ ID NO: 11453 - RNA, 20 nt, synthetic construct
  source 1..20: mol_type = other RNA
aggtggcagcattgggctcc

SEQ ID NO: 11454 - RNA, 20 nt, synthetic construct
  source 1..20: mol_type = other RNA
atctatgaggtggcagcatt

SEQ ID NO: 11455 - RNA, 20 nt, synthetic construct
  source 1..20: mol_type = other RNA
catctatgaggtggcagcat

SEQ ID NO: 11456 - RNA, 20 nt, synthetic construct
  source 1..20: mol_type = other RNA
tcagatacccatctatgagg

SEQ ID NO: 11457 - RNA, 20 nt, synthetic construct
  source 1..20: mol_type = other RNA
caatgctgccacctcataga

SEQ ID NO: 11458 - RNA, 20 nt, synthetic construct
  source 1..20: mol_type = other RNA
atctcagatacccatctatg

SEQ ID NO: 11459 - RNA, 20 nt, synthetic construct
  source 1..20: mol_type = other RNA
aatgctgccacctcatagat

SEQ ID NO: 11460 - RNA, 20 nt, synthetic construct
  source 1..20: mol_type = other RNA
ttagaccagggaggaaactg

SEQ ID NO: 11461 - RNA, 20 nt, synthetic construct
  source 1..20: mol_type = other RNA
gcaagcctcagtttcctccc

SEQ ID NO: 11462 - RNA, 20 nt, synthetic construct
  source 1..20: mol_type = other RNA
agggttccattagaccaggg

SEQ ID NO: 11463 - RNA, 20 nt, synthetic construct
  source 1..20: mol_type = other RNA
aggagggttccattagacca

SEQ ID NO: 11464 - RNA, 20 nt, synthetic construct
  source 1..20: mol_type = other RNA
aaggagggttccattagacc

SEQ ID NO: 11465 - RNA, 20 nt, synthetic construct
  source 1..20: mol_type = other RNA
cagtttcctccctggtctaa

SEQ ID NO: 11466 - RNA, 20 nt, synthetic construct
  source 1..20: mol_type = other RNA
tggtctaatggaaccctcct

SEQ ID NO: 11467 - RNA, 20 nt, synthetic construct
  source 1..20: mol_type = other RNA
ccctgtgaagccgccaagga

SEQ ID NO: 11468 - RNA, 20 nt, synthetic construct
  source 1..20: mol_type = other RNA
tctaatggaaccctccttgg

SEQ ID NO: 11469 - RNA, 20 nt, synthetic construct
  source 1..20: mol_type = other RNA
accctgtgaagccgccaagg

SEQ ID NO: 11470 - RNA, 20 nt, synthetic construct
  source 1..20: mol_type = other RNA
atcaccctgtgaagccgcca

SEQ ID NO: 11471 - RNA, 20 nt, synthetic construct
  source 1..20: mol_type = other RNA
accctccttggcggcttcac

SEQ ID NO: 11472 - RNA, 20 nt, synthetic construct
  source 1..20: mol_type = other RNA
ccctccttggcggcttcaca

SEQ ID NO: 11473 - RNA, 20 nt, synthetic construct
  source 1..20: mol_type = other RNA
cggcttcacagggtgatgct

SEQ ID NO: 11474 - RNA, 20 nt, synthetic construct
  source 1..20: mol_type = other RNA
ggcttcacagggtgatgctt

SEQ ID NO: 11475 - RNA, 20 nt, synthetic construct
  source 1..20: mol_type = other RNA
gcttcacagggtgatgcttg

SEQ ID NO: 11476 - RNA, 20 nt, synthetic construct
  source 1..20: mol_type = other RNA
cacagggtgatgcttggggc

SEQ ID NO: 11477 - RNA, 20 nt, synthetic construct
  source 1..20: mol_type = other RNA
gtgatgcttggggcaggtga

SEQ ID NO: 11478 - RNA, 20 nt, synthetic construct
  source 1..20: mol_type = other RNA
tggggcaggtgatggagatg

SEQ ID NO: 11479 - RNA, 20 nt, synthetic construct
  source 1..20: mol_type = other RNA
ggggcaggtgatggagatgt

SEQ ID NO: 11480 - RNA, 20 nt, synthetic construct
  source 1..20: mol_type = other RNA
aggtgatggagatgtgggag

SEQ ID NO: 11481 - RNA, 20 nt, synthetic construct
  source 1..20: mol_type = other RNA
tggcaaggggcttggctggg

SEQ ID NO: 11482 - RNA, 20 nt, synthetic construct
  source 1..20: mol_type = other RNA
tcctggcaaggggcttggct

SEQ ID NO: 11483 - RNA, 20 nt, synthetic construct
  source 1..20: mol_type = other RNA
ctcctggcaaggggcttggc

SEQ ID NO: 11484 - RNA, 20 nt, synthetic construct
  source 1..20: mol_type = other RNA
gtccctcctggcaaggggct

SEQ ID NO: 11485 - RNA, 20 nt, synthetic construct
  source 1..20: mol_type = other RNA
acccagccaagccccttgcc

SEQ ID NO: 11486 - RNA, 20 nt, synthetic construct
  source 1..20: mol_type = other RNA
tgggagtccctcctggcaag

SEQ ID NO: 11487 - RNA, 20 nt, synthetic construct
  source 1..20: mol_type = other RNA
ctgggagtccctcctggcaa

SEQ ID NO: 11488 - RNA, 20 nt, synthetic construct
  source 1..20: mol_type = other RNA
tctgggagtccctcctggca

SEQ ID NO: 11489 - RNA, 20 nt, synthetic construct
  source 1..20: mol_type = other RNA
cagccaagccccttgccagg

SEQ ID NO: 11490 - RNA, 20 nt, synthetic construct
  source 1..20: mol_type = other RNA
agccaagccccttgccagga

SEQ ID NO: 11491 - RNA, 20 nt, synthetic construct
  source 1..20: mol_type = other RNA
tcatttctgggagtccctcc

SEQ ID NO: 11492 - RNA, 20 nt, synthetic construct
  source 1..20: mol_type = other RNA
aagggtaaggcttcatttct

SEQ ID NO: 11493 - RNA, 20 nt, synthetic construct
  source 1..20: mol_type = other RNA
caagggtaaggcttcatttc

SEQ ID NO: 11494 - RNA, 20 nt, synthetic construct
  source 1..20: mol_type = other RNA
ggggaactccctcaagggta

SEQ ID NO: 11495 - RNA, 20 nt, synthetic construct
  source 1..20: mol_type = other RNA
gaaatgaagccttacccttg

SEQ ID NO: 11496 - RNA, 20 nt, synthetic construct
  source 1..20: mol_type = other RNA
aaatgaagccttacccttga

SEQ ID NO: 11497 - RNA, 20 nt, synthetic construct
  source 1..20: mol_type = other RNA
gtggcggggaactccctcaa

SEQ ID NO: 11498 - RNA, 20 nt, synthetic construct
  source 1..20: mol_type = other RNA
agtggcggggaactccctca

SEQ ID NO: 11499 - RNA, 20 nt, synthetic construct
  source 1..20: mol_type = other RNA
gccccaagcttggagtggcg

SEQ ID NO: 11500 - RNA, 20 nt, synthetic construct
  source 1..20: mol_type = other RNA
ggccccaagcttggagtggc

SEQ ID NO: 11501 - RNA, 20 nt, synthetic construct
  source 1..20: mol_type = other RNA
aggccccaagcttggagtgg

SEQ ID NO: 11502 - RNA, 20 nt, synthetic construct
  source 1..20: mol_type = other RNA
cccaggccccaagcttggag

SEQ ID NO: 11503 - RNA, 20 nt, synthetic construct
  source 1..20: mol_type = other RNA
gttccccgccactccaagct

SEQ ID NO: 11504 - RNA, 20 nt, synthetic construct
  source 1..20: mol_type = other RNA
ttccccgccactccaagctt

SEQ ID NO: 11505 - RNA, 20 nt, synthetic construct
  source 1..20: mol_type = other RNA
tccccgccactccaagcttg

SEQ ID NO: 11506 - RNA, 20 nt, synthetic construct
  source 1..20: mol_type = other RNA
gccatcccaggccccaagct

SEQ ID NO: 11507 - RNA, 20 nt, synthetic construct
  source 1..20: mol_type = other RNA
gccactccaagcttggggcc

SEQ ID NO: 11508 - RNA, 20 nt, synthetic construct
  source 1..20: mol_type = other RNA
ccactccaagcttggggcct

SEQ ID NO: 11509 - RNA, 20 nt, synthetic construct
  source 1..20: mol_type = other RNA
tccaagcttggggcctggga

SEQ ID NO: 11510 - RNA, 20 nt, synthetic construct
  source 1..20: mol_type = other RNA
gccctcacagctgccatccc

SEQ ID NO: 11511 - RNA, 20 nt, synthetic construct
  source 1..20: mol_type = other RNA
ggcctgggatggcagctgtg

SEQ ID NO: 11512 - RNA, 20 nt, synthetic construct
  source 1..20: mol_type = other RNA
gcctgggatggcagctgtga

SEQ ID NO: 11513 - RNA, 20 nt, synthetic construct
  source 1..20: mol_type = other RNA
agcgagtccccagatggtgc

SEQ ID NO: 11514 - RNA, 20 nt, synthetic construct
  source 1..20: mol_type = other RNA
gtgagggcaccagcaccatc

SEQ ID NO: 11515 - RNA, 20 nt, synthetic construct
  source 1..20: mol_type = other RNA
tgagggcaccagcaccatct

SEQ ID NO: 11516 - RNA, 20 nt, synthetic construct
  source 1..20: mol_type = other RNA
gagggcaccagcaccatctg

SEQ ID NO: 11517 - RNA, 20 nt, synthetic construct
  source 1..20: mol_type = other RNA
gtacccagcgagtccccaga

SEQ ID NO: 11518 - RNA, 20 nt, synthetic construct
  source 1..20: mol_type = other RNA
agcaccatctggggactcgc

SEQ ID NO: 11519 - RNA, 20 nt, synthetic construct
  source 1..20: mol_type = other RNA
gcaccatctggggactcgct

SEQ ID NO: 11520 - RNA, 20 nt, synthetic construct
  source 1..20: mol_type = other RNA
agcccaagggcggtgataat

SEQ ID NO: 11521 - RNA, 20 nt, synthetic construct
  source 1..20: mol_type = other RNA
gtaccaattatcaccgccct

SEQ ID NO: 11522 - RNA, 20 nt, synthetic construct
  source 1..20: mol_type = other RNA
taccaattatcaccgccctt

SEQ ID NO: 11523 - RNA, 20 nt, synthetic construct
  source 1..20: mol_type = other RNA
cctttgaagtagcccaaggg

SEQ ID NO: 11524 - RNA, 20 nt, synthetic construct
  source 1..20: mol_type = other RNA
cagcctttgaagtagcccaa

SEQ ID NO: 11525 - RNA, 20 nt, synthetic construct
  source 1..20: mol_type = other RNA
gcagcctttgaagtagccca

SEQ ID NO: 11526 - RNA, 20 nt, synthetic construct
  source 1..20: mol_type = other RNA
ccgcccttgggctacttcaa

SEQ ID NO: 11527 - RNA, 20 nt, synthetic construct
  source 1..20: mol_type = other RNA
caaggagggtgtgtctgtgt

SEQ ID NO: 11528 - RNA, 20 nt, synthetic construct
  source 1..20: mol_type = other RNA
ccaaggagggtgtgtctgtg

SEQ ID NO: 11529 - RNA, 20 nt, synthetic construct
  source 1..20: mol_type = other RNA
ccacacagacacaccctcct

SEQ ID NO: 11530 - RNA, 20 nt, synthetic construct
  source 1..20: mol_type = other RNA
tgaggactggttaccaagga

SEQ ID NO: 11531 - RNA, 20 nt, synthetic construct
  source 1..20: mol_type = other RNA
ctgaggactggttaccaagg

SEQ ID NO: 11532 - RNA, 20 nt, synthetic construct
  source 1..20: mol_type = other RNA
ctcctgaggactggttacca

SEQ ID NO: 11533 - RNA, 20 nt, synthetic construct
  source 1..20: mol_type = other RNA
ctccttggtaaccagtcctc

SEQ ID NO: 11534 - RNA, 20 nt, synthetic construct
  source 1..20: mol_type = other RNA
gtgcccttcctcctgaggac

SEQ ID NO: 11535 - RNA, 20 nt, synthetic construct
  source 1..20: mol_type = other RNA
cttggtaaccagtcctcagg

SEQ ID NO: 11536 - RNA, 20 nt, synthetic construct
  source 1..20: mol_type = other RNA
cttgggtgcccttcctcctg

SEQ ID NO: 11537 - RNA, 20 nt, synthetic construct
  source 1..20: mol_type = other RNA
gtaaccagtcctcaggagga

SEQ ID NO: 11538 - RNA, 20 nt, synthetic construct
  source 1..20: mol_type = other RNA
taaccagtcctcaggaggaa

SEQ ID NO: 11539 - RNA, 20 nt, synthetic construct
  source 1..20: mol_type = other RNA
ctcaggaggaagggcaccca

SEQ ID NO: 11540 - RNA, 20 nt, synthetic construct
  source 1..20: mol_type = other RNA
gaggaagggcacccaaggaa

SEQ ID NO: 11541 - RNA, 20 nt, synthetic construct
  source 1..20: mol_type = other RNA
gaagccttccccctttcctt

SEQ ID NO: 11542 - RNA, 20 nt, synthetic construct
  source 1..20: mol_type = other RNA
aggaagggcacccaaggaaa

SEQ ID NO: 11543 - RNA, 20 nt, synthetic construct
  source 1..20: mol_type = other RNA
ggaagccttccccctttcct

SEQ ID NO: 11544 - RNA, 20 nt, synthetic construct
  source 1..20: mol_type = other RNA
ggaagggcacccaaggaaag

SEQ ID NO: 11545 - RNA, 20 nt, synthetic construct
  source 1..20: mol_type = other RNA
gaagggcacccaaggaaagg

SEQ ID NO: 11546 - RNA, 20 nt, synthetic construct
  source 1..20: mol_type = other RNA
ggcacccaaggaaaggggga

SEQ ID NO: 11547 - RNA, 20 nt, synthetic construct
  source 1..20: mol_type = other RNA
aggaaagggggaaggcttcc

SEQ ID NO: 11548 - RNA, 20 nt, synthetic construct
  source 1..20: mol_type = other RNA
ggaaagggggaaggcttcct

SEQ ID NO: 11549 - RNA, 20 nt, synthetic construct
  source 1..20: mol_type = other RNA
ccctgaaggggctctagccc

SEQ ID NO: 11550 - RNA, 20 nt, synthetic construct
  source 1..20: mol_type = other RNA
tcctgggctagagccccttc

SEQ ID NO: 11551 - RNA, 20 nt, synthetic construct
  source 1..20: mol_type = other RNA
cctgggctagagccccttca

SEQ ID NO: 11552 - RNA, 20 nt, synthetic construct
  source 1..20: mol_type = other RNA
tggcgtgtcagaccctgaag

SEQ ID NO: 11553 - RNA, 20 nt, synthetic construct
  source 1..20: mol_type = other RNA
atggcgtgtcagaccctgaa

SEQ ID NO: 11554 - RNA, 20 nt, synthetic construct
  source 1..20: mol_type = other RNA
aatggcgtgtcagaccctga

SEQ ID NO: 11555 - RNA, 20 nt, synthetic construct
  source 1..20: mol_type = other RNA
aatgacgtggtcagtgtcaa

SEQ ID NO: 11556 - RNA, 20 nt, synthetic construct
  source 1..20: mol_type = other RNA
tgcttgcttaatgaatgacg

SEQ ID NO: 11557 - RNA, 20 nt, synthetic construct
  source 1..20: mol_type = other RNA
gatagtgaatgatgtatagt

SEQ ID NO: 11558 - RNA, 20 nt, synthetic construct
  source 1..20: mol_type = other RNA
gggcttgtgcaaattagatt

SEQ ID NO: 11559 - RNA, 20 nt, synthetic construct
  source 1..20: mol_type = other RNA
agggcttgtgcaaattagat

SEQ ID NO: 11560 - RNA, 20 nt, synthetic construct
  source 1..20: mol_type = other RNA
tctaatttgcacaagccctt

SEQ ID NO: 11561 - RNA, 20 nt, synthetic construct
  source 1..20: mol_type = other RNA
atttgcacaagcccttaggc

SEQ ID NO: 11562 - RNA, 20 nt, synthetic construct
  source 1..20: mol_type = other RNA
taatagtagcacctgcctaa

SEQ ID NO: 11563 - RNA, 20 nt, synthetic construct
  source 1..20: mol_type = other RNA
ataatagtagcacctgccta

SEQ ID NO: 11564 - RNA, 20 nt, synthetic construct
  source 1..20: mol_type = other RNA
gtttccttctctgtaaaaca

SEQ ID NO: 11565 - RNA, 20 nt, synthetic construct
  source 1..20: mol_type = other RNA
ggtttccttctctgtaaaac

SEQ ID NO: 11566 - RNA, 20 nt, synthetic construct
  source 1..20: mol_type = other RNA
ttatccctgttttacagaga

SEQ ID NO: 11567 - RNA, 20 nt, synthetic construct
  source 1..20: mol_type = other RNA
ttttacagagaaggaaaccg

SEQ ID NO: 11568 - RNA, 20 nt, synthetic construct
  source 1..20: mol_type = other RNA
agagaaggaaaccgaggctt

SEQ ID NO: 11569 - RNA, 20 nt, synthetic construct
  source 1..20: mol_type = other RNA
agacttcatctcctaagcct

SEQ ID NO: 11570 - RNA, 20 nt, synthetic construct
  source 1..20: mol_type = other RNA
ggcttaggagatgaagtctg

SEQ ID NO: 11571 - RNA, 20 nt, synthetic construct
  source 1..20: mol_type = other RNA
ggagatgaagtctgaggtgt

SEQ ID NO: 11572 - RNA, 20 nt, synthetic construct
  source 1..20: mol_type = other RNA
gatgaagtctgaggtgttgg

SEQ ID NO: 11573 - RNA, 20 nt, synthetic construct
  source 1..20: mol_type = other RNA
gtctgaggtgttggtggagc

SEQ ID NO: 11574 - RNA, 20 nt, synthetic construct
  source 1..20: mol_type = other RNA
tctgaggtgttggtggagct

SEQ ID NO: 11575 - RNA, 20 nt, synthetic construct
  source 1..20: mol_type = other RNA
ctttgcagttggacatattt

SEQ ID NO: 11576 - RNA, 20 nt, synthetic construct
  source 1..20: mol_type = other RNA
ttacttacatgctttgcagt

SEQ ID NO: 11577 - RNA, 20 nt, synthetic construct
  source 1..20: mol_type = other RNA
catgtaagtaacaattttag

SEQ ID NO: 11578 - RNA, 20 nt, synthetic construct
  source 1..20: mol_type = other RNA
atgtaagtaacaattttaga

SEQ ID NO: 11579 - RNA, 20 nt, synthetic construct
  source 1..20: mol_type = other RNA
taacaattttagagggtata

SEQ ID NO: 11580 - RNA, 20 nt, synthetic construct
  source 1..20: mol_type = other RNA
caattttagagggtatacgg

SEQ ID NO: 11581 - RNA, 20 nt, synthetic construct
  source 1..20: mol_type = other RNA
atgtgattccttgttactta

SEQ ID NO: 11582 - RNA, 20 nt, synthetic construct
  source 1..20: mol_type = other RNA
tatgtgattccttgttactt

SEQ ID NO: 11583 - RNA, 20 nt, synthetic construct
  source 1..20: mol_type = other RNA
ggaggtgaccctaagtaaca

SEQ ID NO: 11584 - RNA, 20 nt, synthetic construct
  source 1..20: mol_type = other RNA
gcaatttgcttttcagtttt

SEQ ID NO: 11585 - RNA, 20 nt, synthetic construct
  source 1..20: mol_type = other RNA
ttctcctctaaataatcata

SEQ ID NO: 11586 - RNA, 20 nt, synthetic construct
  source 1..20: mol_type = other RNA
caatccttatgattatttag

SEQ ID NO: 11587 - RNA, 20 nt, synthetic construct
  source 1..20: mol_type = other RNA
ttagaggagaaagttcagtt

SEQ ID NO: 11588 - RNA, 20 nt, synthetic construct
  source 1..20: mol_type = other RNA
gagaaagttcagtttggtgc

SEQ ID NO: 11589 - RNA, 20 nt, synthetic construct
  source 1..20: mol_type = other RNA
aaaagagattaacaactgtc

SEQ ID NO: 11590 - RNA, 20 nt, synthetic construct
  source 1..20: mol_type = other RNA
aaaaagagattaacaactgt

SEQ ID NO: 11591 - RNA, 20 nt, synthetic construct
  source 1..20: mol_type = other RNA
ctctttttaacaaagaatac

SEQ ID NO: 11592 - RNA, 20 nt, synthetic construct
  source 1..20: mol_type = other RNA
ttaacaaagaatacaggcca

SEQ ID NO: 11593 - RNA, 20 nt, synthetic construct
  source 1..20: mol_type = other RNA
cagctaaagtcacagggcct

SEQ ID NO: 11594 - RNA, 20 nt, synthetic construct
  source 1..20: mol_type = other RNA
caaagccagctaaagtcaca

SEQ ID NO: 11595 - RNA, 20 nt, synthetic construct
  source 1..20: mol_type = other RNA
ccaaagccagctaaagtcac

SEQ ID NO: 11596 - RNA, 20 nt, synthetic construct
  source 1..20: mol_type = other RNA
caaggccctgtgactttagc

SEQ ID NO: 11597 - RNA, 20 nt, synthetic construct
  source 1..20: mol_type = other RNA
cctgtgactttagctggctt

SEQ ID NO: 11598 - RNA, 20 nt, synthetic construct
  source 1..20: mol_type = other RNA
ctttagctggctttggtatt

SEQ ID NO: 11599 - RNA, 20 nt, synthetic construct
  source 1..20: mol_type = other RNA
ctgccaaagtcattaacttt

SEQ ID NO: 11600 - RNA, 20 nt, synthetic construct
  source 1..20: mol_type = other RNA
tggccaaaagttaatgactt

SEQ ID NO: 11601 - RNA, 20 nt, synthetic construct
  source 1..20: mol_type = other RNA
aaaatcatcatcgcttggca

SEQ ID NO: 11602 - RNA, 20 nt, synthetic construct
  source 1..20: mol_type = other RNA
aagagaaaatcatcatcgct

SEQ ID NO: 11603 - RNA, 20 nt, synthetic construct
  source 1..20: mol_type = other RNA
tcttaaactgcaaattataa

SEQ ID NO: 11604 - RNA, 20 nt, synthetic construct
  source 1..20: mol_type = other RNA
cttaaactgcaaattataaa

SEQ ID NO: 11605 - RNA, 20 nt, synthetic construct
  source 1..20: mol_type = other RNA
gaataatagtaacttgacag

SEQ ID NO: 11606 - RNA, 20 nt, synthetic construct
  source 1..20: mol_type = other RNA
aacttgacagtggagagacc

SEQ ID NO: 11607 - RNA, 20 nt, synthetic construct
  source 1..20: mol_type = other RNA
tggtgaaggtggtgtctgcc

SEQ ID NO: 11608 - RNA, 20 nt, synthetic construct
  source 1..20: mol_type = other RNA
ctttgatcagttggtgaagg

SEQ ID NO: 11609 - RNA, 20 nt, synthetic construct
  source 1..20: mol_type = other RNA
taactttgatcagttggtga

SEQ ID NO: 11610 - RNA, 20 nt, synthetic construct
  source 1..20: mol_type = other RNA
cgatgttaactttgatcagt

SEQ ID NO: 11611 - RNA, 20 nt, synthetic construct
  source 1..20: mol_type = other RNA
caaagttaacatcgccagaa

SEQ ID NO: 11612 - RNA, 20 nt, synthetic construct
  source 1..20: mol_type = other RNA
aaagttaacatcgccagaaa

SEQ ID NO: 11613 - RNA, 20 nt, synthetic construct
  source 1..20: mol_type = other RNA
aagttaacatcgccagaaag

SEQ ID NO: 11614 - RNA, 20 nt, synthetic construct
  source 1..20: mol_type = other RNA
catgccatctgtcccctttc

SEQ ID NO: 11615 - RNA, 20 nt, synthetic construct
  source 1..20: mol_type = other RNA
atcgccagaaaggggacaga

SEQ ID NO: 11616 - RNA, 20 nt, synthetic construct
  source 1..20: mol_type = other RNA
cttcagtgcatcttatcgag

SEQ ID NO: 11617 - RNA, 20 nt, synthetic construct
  source 1..20: mol_type = other RNA
tcagatgaggcattcttggc

SEQ ID NO: 11618 - RNA, 20 nt, synthetic construct
  source 1..20: mol_type = other RNA
agattcagatgaggcattct

SEQ ID NO: 11619 - RNA, 20 nt, synthetic construct
  source 1..20: mol_type = other RNA
ctcgagattagattcagatg

SEQ ID NO: 11620 - RNA, 20 nt, synthetic construct
  source 1..20: mol_type = other RNA
ctcaatttgggtttgtctga

SEQ ID NO: 11621 - RNA, 20 nt, synthetic construct
  source 1..20: mol_type = other RNA
tgtaaactgtctctcaattt

SEQ ID NO: 11622 - RNA, 20 nt, synthetic construct
  source 1..20: mol_type = other RNA
ttgtaaactgtctctcaatt

SEQ ID NO: 11623 - RNA, 20 nt, synthetic construct
  source 1..20: mol_type = other RNA
tattaagcagagtacaaggc

SEQ ID NO: 11624 - RNA, 20 nt, synthetic construct
  source 1..20: mol_type = other RNA
gacatattaagcagagtaca

SEQ ID NO: 11625 - RNA, 20 nt, synthetic construct
  source 1..20: mol_type = other RNA
gagctgatccagactgaaga

SEQ ID NO: 11626 - RNA, 20 nt, synthetic construct
  source 1..20: mol_type = other RNA
gattaatgcaaaagctgatc

SEQ ID NO: 11627 - RNA, 20 nt, synthetic construct
  source 1..20: mol_type = other RNA
attaatgcaaaagctgatct

SEQ ID NO: 11628 - RNA, 20 nt, synthetic construct
  source 1..20: mol_type = other RNA
gctgatctgggattgcatct

SEQ ID NO: 11629 - RNA, 20 nt, synthetic construct
  source 1..20: mol_type = other RNA
caataaaaaggggagagttg

SEQ ID NO: 11630 - RNA, 20 nt, synthetic construct
  source 1..20: mol_type = other RNA
tgtcccttaacaataaaaag

SEQ ID NO: 11631 - RNA, 20 nt, synthetic construct
  source 1..20: mol_type = other RNA
gtgtcccttaacaataaaaa

SEQ ID NO: 11632 - RNA, 20 nt, synthetic construct
  source 1..20: mol_type = other RNA
agtgtcccttaacaataaaa

SEQ ID NO: 11633 - RNA, 20 nt, synthetic construct
  source 1..20: mol_type = other RNA
ctctcccctttttattgtta

SEQ ID NO: 11634 - RNA, 20 nt, synthetic construct
  source 1..20: mol_type = other RNA
tctcccctttttattgttaa

SEQ ID NO: 11635 - RNA, 20 nt, synthetic construct
  source 1..20: mol_type = other RNA
ttattgttaagggacactac

SEQ ID NO: 11636 - RNA, 20 nt, synthetic construct
  source 1..20: mol_type = other RNA
tattgttaagggacactact

SEQ ID NO: 11637 - RNA, 20 nt, synthetic construct
  source 1..20: mol_type = other RNA
tttttttttcgttttgagac

SEQ ID NO: 11638 - RNA, 20 nt, synthetic construct
  source 1..20: mol_type = other RNA
ttttttttcgttttgagaca

SEQ ID NO: 11639 - RNA, 20 nt, synthetic construct
  source 1..20: mol_type = other RNA
agggtctcgctcagtcaccc

SEQ ID NO: 11640 - RNA, 20 nt, synthetic construct
  source 1..20: mol_type = other RNA
tctcgctcagtcacccaggc

SEQ ID NO: 11641 - RNA, 20 nt, synthetic construct
  source 1..20: mol_type = other RNA
ccaccactgcactccagcct

SEQ ID NO: 11642 - RNA, 20 nt, synthetic construct
  source 1..20: mol_type = other RNA
tccaccactgcactccagcc

SEQ ID NO: 11643 - RNA, 20 nt, synthetic construct
  source 1..20: mol_type = other RNA
tcacccaggctggagtgcag

SEQ ID NO: 11644 - RNA, 20 nt, synthetic construct
  source 1..20: mol_type = other RNA
cccaggctggagtgcagtgg

SEQ ID NO: 11645 - RNA, 20 nt, synthetic construct
  source 1..20: mol_type = other RNA
tgcttgagtccgggagttca

SEQ ID NO: 11646 - RNA, 20 nt, synthetic construct
  source 1..20: mol_type = other RNA
tcactgcagccttgaactcc

SEQ ID NO: 11647 - RNA, 20 nt, synthetic construct
  source 1..20: mol_type = other RNA
caggaggattgcttgagtcc

SEQ ID NO: 11648 - RNA, 20 nt, synthetic construct
  source 1..20: mol_type = other RNA
gcaggaggattgcttgagtc

SEQ ID NO: 11649 - RNA, 20 nt, synthetic construct
  source 1..20: mol_type = other RNA
actcggaaggctcaggcagg

SEQ ID NO: 11650 - RNA, 20 nt, synthetic construct
  source 1..20: mol_type = other RNA
gttactcggaaggctcaggc

SEQ ID NO: 11651 - RNA, 20 nt, synthetic construct
  source 1..20: mol_type = other RNA
cccagttactcggaaggctc

SEQ ID NO: 11652 - RNA, 20 nt, synthetic construct
  source 1..20: mol_type = other RNA
catagtcccagttactcgga

SEQ ID NO: 11653 - RNA, 20 nt, synthetic construct
  source 1..20: mol_type = other RNA
gcctgagccttccgagtaac

SEQ ID NO: 11654 - RNA, 20 nt, synthetic construct
  source 1..20: mol_type = other RNA
cgcccatagtcccagttact

SEQ ID NO: 11655 - RNA, 20 nt, synthetic construct
  source 1..20: mol_type = other RNA
cctgagccttccgagtaact

SEQ ID NO: 11656 - RNA, 20 nt, synthetic construct
  source 1..20: mol_type = other RNA
cttccgagtaactgggacta

SEQ ID NO: 11657 - RNA, 20 nt, synthetic construct
  source 1..20: mol_type = other RNA
ttccgagtaactgggactat

SEQ ID NO: 11658 - RNA, 20 nt, synthetic construct
  source 1..20: mol_type = other RNA
aaaaaaatagcgaggtgttg

SEQ ID NO: 11659 - RNA, 20 nt, synthetic construct
  source 1..20: mol_type = other RNA
gtaggaaaaaaaaaatagcg

SEQ ID NO: 11660 - RNA, 20 nt, synthetic construct
  source 1..20: mol_type = other RNA
accccgtctctacaaaaagt

SEQ ID NO: 11661 - RNA, 20 nt, synthetic construct
  source 1..20: mol_type = other RNA
tttcctactttttgtagaga

SEQ ID NO: 11662 - RNA, 20 nt, synthetic construct
  source 1..20: mol_type = other RNA
ttcctactttttgtagagac

SEQ ID NO: 11663 - RNA, 20 nt, synthetic construct
  source 1..20: mol_type = other RNA
tcctactttttgtagagacg

SEQ ID NO: 11664 - RNA, 20 nt, synthetic construct
  source 1..20: mol_type = other RNA
ggggtctcactatgttgccc

SEQ ID NO: 11665 - RNA, 20 nt, synthetic construct
  source 1..20: mol_type = other RNA
tctcactatgttgcccaggc

SEQ ID NO: 11666 - RNA, 20 nt, synthetic construct
  source 1..20: mol_type = other RNA
cttgagtttgaaaccagcct

SEQ ID NO: 11667 - RNA, 20 nt, synthetic construct
  source 1..20: mol_type = other RNA
acttgagtttgaaaccagcc

SEQ ID NO: 11668 - RNA, 20 nt, synthetic construct
  source 1..20: mol_type = other RNA
tttatagaggctgaggtgga

SEQ ID NO: 11669 - RNA, 20 nt, synthetic construct
  source 1..20: mol_type = other RNA
aaattttatagaggctgagg

SEQ ID NO: 11670 - RNA, 20 nt, synthetic construct
  source 1..20: mol_type = other RNA
ttcaaattttatagaggctg

SEQ ID NO: 11671 - RNA, 20 nt, synthetic construct
  source 1..20: mol_type = other RNA
actttattcaaattttatag

SEQ ID NO: 11672 - RNA, 20 nt, synthetic construct
  source 1..20: mol_type = other RNA
aataaagttgtagatgagat

SEQ ID NO: 11673 - RNA, 20 nt, synthetic construct
  source 1..20: mol_type = other RNA
ttgtagatgagattggtcat

SEQ ID NO: 11674 - RNA, 20 nt, synthetic construct
  source 1..20: mol_type = other RNA
tgattttgacaaccctactg

SEQ ID NO: 11675 - RNA, 20 nt, synthetic construct
  source 1..20: mol_type = other RNA
aaatttgcataaccacagta

SEQ ID NO: 11676 - RNA, 20 nt, synthetic construct
  source 1..20: mol_type = other RNA
caaatttgcataaccacagt

SEQ ID NO: 11677 - RNA, 20 nt, synthetic construct
  source 1..20: mol_type = other RNA
gtatttatttccttagaaca

SEQ ID NO: 11678 - RNA, 20 nt, synthetic construct
  source 1..20: mol_type = other RNA
gcaaatttgtccttgttcta

SEQ ID NO: 11679 - RNA, 20 nt, synthetic construct
  source 1..20: mol_type = other RNA
aaataaatactgaattattt

SEQ ID NO: 11680 - RNA, 20 nt, synthetic construct
  source 1..20: mol_type = other RNA
actgaattatttaggagtaa

SEQ ID NO: 11681 - RNA, 20 nt, synthetic construct
  source 1..20: mol_type = other RNA
tttcataagcatttgaaaat

SEQ ID NO: 11682 - RNA, 20 nt, synthetic construct
  source 1..20: mol_type = other RNA
ttttcataagcatttgaaaa

SEQ ID NO: 11683 - RNA, 20 nt, synthetic construct
  source 1..20: mol_type = other RNA
acacatgtgtgcatatacac

SEQ ID NO: 11684 - RNA, 20 nt, synthetic construct
  source 1..20: mol_type = other RNA
aggcatgcatatacaaacag

SEQ ID NO: 11685 - RNA, 20 nt, synthetic construct
  source 1..20: mol_type = other RNA
ggcatgcatatacaaacaga

SEQ ID NO: 11686 - RNA, 20 nt, synthetic construct
  source 1..20: mol_type = other RNA
tacatgagcaaagtgctaac

SEQ ID NO: 11687 - RNA, 20 nt, synthetic construct
  source 1..20: mol_type = other RNA
aaagtgctaactggtgcaac

SEQ ID NO: 11688 - RNA, 20 nt, synthetic construct
  source 1..20: mol_type = other RNA
actggtgcaactggtgagtt

SEQ ID NO: 11689 - RNA, 20 nt, synthetic construct
  source 1..20: mol_type = other RNA
ctggtgcaactggtgagttt

SEQ ID NO: 11690 - RNA, 20 nt, synthetic construct
  source 1..20: mol_type = other RNA
gtgcaactggtgagtttggg

SEQ ID NO: 11691 - RNA, 20 nt, synthetic construct
  source 1..20: mol_type = other RNA
tgcaactggtgagtttgggc

SEQ ID NO: 11692 - RNA, 20 nt, synthetic construct
  source 1..20: mol_type = other RNA
gtgaaattacttcataacag

SEQ ID NO: 11693 - RNA, 20 nt, synthetic construct
  source 1..20: mol_type = other RNA
tgtttgtttgtttttaattc

SEQ ID NO: 11694 - RNA, 20 nt, synthetic construct
  source 1..20: mol_type = other RNA
tttttaattcaggaaaaagt

SEQ ID NO: 11695 - RNA, 20 nt, synthetic construct
  source 1..20: mol_type = other RNA
tggaagagtgcgtatgaaat

SEQ ID NO: 11696 - RNA, 20 nt, synthetic construct
  source 1..20: mol_type = other RNA
gagtgcgtatgaaataggcc

SEQ ID NO: 11697 - RNA, 20 nt, synthetic construct
  source 1..20: mol_type = other RNA
accagctcatagtttctgcc

SEQ ID NO: 11698 - RNA, 20 nt, synthetic construct
  source 1..20: mol_type = other RNA
gcctggcagaaactatgagc

SEQ ID NO: 11699 - RNA, 20 nt, synthetic construct
  source 1..20: mol_type = other RNA
aactatgagctggtgttcca

SEQ ID NO: 11700 - RNA, 20 nt, synthetic construct
  source 1..20: mol_type = other RNA
atgagctggtgttccaaggt

SEQ ID NO: 11701 - RNA, 20 nt, synthetic construct
  source 1..20: mol_type = other RNA
tgagctggtgttccaaggtc

SEQ ID NO: 11702 - RNA, 20 nt, synthetic construct
  source 1..20: mol_type = other RNA
gagctggtgttccaaggtcg

SEQ ID NO: 11703 - RNA, 20 nt, synthetic construct
  source 1..20: mol_type = other RNA
gggctccccatccccgacct

SEQ ID NO: 11704 - RNA, 20 nt, synthetic construct
  source 1..20: mol_type = other RNA
tggtgttccaaggtcgggga

SEQ ID NO: 11705 - RNA, 20 nt, synthetic construct
  source 1..20: mol_type = other RNA
ggtgttccaaggtcggggat

SEQ ID NO: 11706 - RNA, 20 nt, synthetic construct
  source 1..20: mol_type = other RNA
gtgttccaaggtcggggatg

SEQ ID NO: 11707 - RNA, 20 nt, synthetic construct
  source 1..20: mol_type = other RNA
cggggatggggagccctcac

SEQ ID NO: 11708 - RNA, 20 nt, synthetic construct
  source 1..20: mol_type = other RNA
ttgaggggtgcctccagtga

SEQ ID NO: 11709 - RNA, 20 nt, synthetic construct
  source 1..20: mol_type = other RNA
ggatggggagccctcactgg

SEQ ID NO: 11710 - RNA, 20 nt, synthetic construct
  source 1..20: mol_type = other RNA
tttgaggggtgcctccagtg

SEQ ID NO: 11711 - RNA, 20 nt, synthetic construct
  source 1..20: mol_type = other RNA
cacagcactgagggtttgag

SEQ ID NO: 11712 - RNA, 20 nt, synthetic construct
  source 1..20: mol_type = other RNA
ccacagcactgagggtttga

SEQ ID NO: 11713 - RNA, 20 nt, synthetic construct
  source 1..20: mol_type = other RNA
gccacagcactgagggtttg

SEQ ID NO: 11714 - RNA, 20 nt, synthetic construct
  source 1..20: mol_type = other RNA
ttccctggccacagcactga

SEQ ID NO: 11715 - RNA, 20 nt, synthetic construct
  source 1..20: mol_type = other RNA
gttccctggccacagcactg

SEQ ID NO: 11716 - RNA, 20 nt, synthetic construct
  source 1..20: mol_type = other RNA
ccctcaaaccctcagtgctg

SEQ ID NO: 11717 - RNA, 20 nt, synthetic construct
  source 1..20: mol_type = other RNA
aaaccctcagtgctgtggcc

SEQ ID NO: 11718 - RNA, 20 nt, synthetic construct
  source 1..20: mol_type = other RNA
aaccctcagtgctgtggcca

SEQ ID NO: 11719 - RNA, 20 nt, synthetic construct
  source 1..20: mol_type = other RNA
cagtgctgtggccagggaac

SEQ ID NO: 11720 - RNA, 20 nt, synthetic construct
  source 1..20: mol_type = other RNA
agactgccagcccggttccc

SEQ ID NO: 11721 - RNA, 20 nt, synthetic construct
  source 1..20: mol_type = other RNA
agtgctgtggccagggaacc

SEQ ID NO: 11722 - RNA, 20 nt, synthetic construct
  source 1..20: mol_type = other RNA
ctgtggccagggaaccgggc

SEQ ID NO: 11723 - RNA, 20 nt, synthetic construct
  source 1..20: mol_type = other RNA
gccaactaagactgccagcc

SEQ ID NO: 11724 - RNA, 20 nt, synthetic construct
  source 1..20: mol_type = other RNA
accgggctggcagtcttagt

SEQ ID NO: 11725 - RNA, 20 nt, synthetic construct
  source 1..20: mol_type = other RNA
cttagttggctttgttccct

SEQ ID NO: 11726 - RNA, 20 nt, synthetic construct
  source 1..20: mol_type = other RNA
aatggggaagtggaggccga

SEQ ID NO: 11727 - RNA, 20 nt, synthetic construct
  source 1..20: mol_type = other RNA
gaatggggaagtggaggccg

SEQ ID NO: 11728 - RNA, 20 nt, synthetic construct
  source 1..20: mol_type = other RNA
ggcacagaatggggaagtgg

SEQ ID NO: 11729 - RNA, 20 nt, synthetic construct
  source 1..20: mol_type = other RNA
ggaggcacagaatggggaag

SEQ ID NO: 11730 - RNA, 20 nt, synthetic construct
  source 1..20: mol_type = other RNA
ataaatggaggcacagaatg

SEQ ID NO: 11731 - RNA, 20 nt, synthetic construct
  source 1..20: mol_type = other RNA
aataaatggaggcacagaat

SEQ ID NO: 11732 - RNA, 20 nt, synthetic construct
  source 1..20: mol_type = other RNA
aaataaatggaggcacagaa

SEQ ID NO: 11733 - RNA, 20 nt, synthetic construct
  source 1..20: mol_type = other RNA
cctgtctcacaaataaatgg

SEQ ID NO: 11734 - RNA, 20 nt, synthetic construct
  source 1..20: mol_type = other RNA
atccctgtctcacaaataaa

SEQ ID NO: 11735 - RNA, 20 nt, synthetic construct
  source 1..20: mol_type = other RNA
cctccatttatttgtgagac

SEQ ID NO: 11736 - RNA, 20 nt, synthetic construct
  source 1..20: mol_type = other RNA
ctccatttatttgtgagaca

SEQ ID NO: 11737 - RNA, 20 nt, synthetic construct
  source 1..20: mol_type = other RNA
tttgtgagacagggataaag

SEQ ID NO: 11738 - RNA, 20 nt, synthetic construct
  source 1..20: mol_type = other RNA
acctaagatcacaataaaag

SEQ ID NO: 11739 - RNA, 20 nt, synthetic construct
  source 1..20: mol_type = other RNA
gccacttttattgtgatctt

SEQ ID NO: 11740 - RNA, 20 nt, synthetic construct
  source 1..20: mol_type = other RNA
tgaaagcatactcggctttt

SEQ ID NO: 11741 - RNA, 20 nt, synthetic construct
  source 1..20: mol_type = other RNA
ctgaaagcatactcggcttt

SEQ ID NO: 11742 - RNA, 20 nt, synthetic construct
  source 1..20: mol_type = other RNA
agaacttctgaaagcatact

SEQ ID NO: 11743 - RNA, 20 nt, synthetic construct
  source 1..20: mol_type = other RNA
gagtatgctttcagaagttc

SEQ ID NO: 11744 - RNA, 20 nt, synthetic construct
  source 1..20: mol_type = other RNA
agtatgctttcagaagttct

SEQ ID NO: 11745 - RNA, 20 nt, synthetic construct
  source 1..20: mol_type = other RNA
atgctttcagaagttctggg

SEQ ID NO: 11746 - RNA, 20 nt, synthetic construct
  source 1..20: mol_type = other RNA
aatttggatattcatatttc

SEQ ID NO: 11747 - RNA, 20 nt, synthetic construct
  source 1..20: mol_type = other RNA
agtgagggcttctctcaatt

SEQ ID NO: 11748 - RNA, 20 nt, synthetic construct
  source 1..20: mol_type = other RNA
ttgccgaactaagaaagtga

SEQ ID NO: 11749 - RNA, 20 nt, synthetic construct
  source 1..20: mol_type = other RNA
tttgccgaactaagaaagtg

SEQ ID NO: 11750 - RNA, 20 nt, synthetic construct
  source 1..20: mol_type = other RNA
aagccctcactttcttagtt

SEQ ID NO: 11751 - RNA, 20 nt, synthetic construct
  source 1..20: mol_type = other RNA
acagacacatgagctgtaag

SEQ ID NO: 11752 - RNA, 20 nt, synthetic construct
  source 1..20: mol_type = other RNA
cagacacatgagctgtaagt

SEQ ID NO: 11753 - RNA, 20 nt, synthetic construct
  source 1..20: mol_type = other RNA
agacacatgagctgtaagtg

SEQ ID NO: 11754 - RNA, 20 nt, synthetic construct
  source 1..20: mol_type = other RNA
tttcagccaagaaacaggca

SEQ ID NO: 11755 - RNA, 20 nt, synthetic construct
  source 1..20: mol_type = other RNA
atttcagccaagaaacaggc

SEQ ID NO: 11756 - RNA, 20 nt, synthetic construct
  source 1..20: mol_type = other RNA
ggcagaccctgcctgtttct

SEQ ID NO: 11757 - RNA, 20 nt, synthetic construct
  source 1..20: mol_type = other RNA
ggagatttcagccaagaaac

SEQ ID NO: 11758 - RNA, 20 nt, synthetic construct
  source 1..20: mol_type = other RNA
tagccctgaattatacaaac

SEQ ID NO: 11759 - RNA, 20 nt, synthetic construct
  source 1..20: mol_type = other RNA
atctccagtttgtataattc

SEQ ID NO: 11760 - RNA, 20 nt, synthetic construct
  source 1..20: mol_type = other RNA
tctccagtttgtataattca

SEQ ID NO: 11761 - RNA, 20 nt, synthetic construct
  source 1..20: mol_type = other RNA
taattcagggctaagagagc

SEQ ID NO: 11762 - RNA, 20 nt, synthetic construct
  source 1..20: mol_type = other RNA
cactgtcttgagacacatac

SEQ ID NO: 11763 - RNA, 20 nt, synthetic construct
  source 1..20: mol_type = other RNA
actgtcttgagacacatact

SEQ ID NO: 11764 - RNA, 20 nt, synthetic construct
  source 1..20: mol_type = other RNA
ctgtcttgagacacatactg

SEQ ID NO: 11765 - RNA, 20 nt, synthetic construct
  source 1..20: mol_type = other RNA
tgccagctgcgtcttcagac

SEQ ID NO: 11766 - RNA, 20 nt, synthetic construct
  source 1..20: mol_type = other RNA
ctcctgtctgaagacgcagc

SEQ ID NO: 11767 - RNA, 20 nt, synthetic construct
  source 1..20: mol_type = other RNA
tccttggccatagggtacat

SEQ ID NO: 11768 - RNA, 20 nt, synthetic construct
  source 1..20: mol_type = other RNA
gctggcaccaatgtacccta

SEQ ID NO: 11769 - RNA, 20 nt, synthetic construct
  source 1..20: mol_type = other RNA
ccagaaggtccttggccata

SEQ ID NO: 11770 - RNA, 20 nt, synthetic construct
  source 1..20: mol_type = other RNA
cccagaaggtccttggccat

SEQ ID NO: 11771 - RNA, 20 nt, synthetic construct
  source 1..20: mol_type = other RNA
accaatgtaccctatggcca

SEQ ID NO: 11772 - RNA, 20 nt, synthetic construct
  source 1..20: mol_type = other RNA
aggctcacccagaaggtcct

SEQ ID NO: 11773 - RNA, 20 nt, synthetic construct
  source 1..20: mol_type = other RNA
ccctatggccaaggaccttc

SEQ ID NO: 11774 - RNA, 20 nt, synthetic construct
  source 1..20: mol_type = other RNA
cctatggccaaggaccttct

SEQ ID NO: 11775 - RNA, 20 nt, synthetic construct
  source 1..20: mol_type = other RNA
tgacatgaggctcacccaga

SEQ ID NO: 11776 - RNA, 20 nt, synthetic construct
  source 1..20: mol_type = other RNA
ttctgggtgagcctcatgtc

SEQ ID NO: 11777 - RNA, 20 nt, synthetic construct
  source 1..20: mol_type = other RNA
ccagctctgctcctgacatg

SEQ ID NO: 11778 - RNA, 20 nt, synthetic construct
  source 1..20: mol_type = other RNA
cctcatgtcaggagcagagc

SEQ ID NO: 11779 - RNA, 20 nt, synthetic construct
  source 1..20: mol_type = other RNA
tgtcaggagcagagctggag

SEQ ID NO: 11780 - RNA, 20 nt, synthetic construct
  source 1..20: mol_type = other RNA
caggagcagagctggagagg

SEQ ID NO: 11781 - RNA, 20 nt, synthetic construct
  source 1..20: mol_type = other RNA
gcagagctggagaggtggcc

SEQ ID NO: 11782 - RNA, 20 nt, synthetic construct
  source 1..20: mol_type = other RNA
gctggagaggtggccaggcc

SEQ ID NO: 11783 - RNA, 20 nt, synthetic construct
  source 1..20: mol_type = other RNA
ctggagaggtggccaggcct

SEQ ID NO: 11784 - RNA, 20 nt, synthetic construct
  source 1..20: mol_type = other RNA
tggagaggtggccaggcctg

SEQ ID NO: 11785 - RNA, 20 nt, synthetic construct
  source 1..20: mol_type = other RNA
ggcaagtatacccccaggcc

SEQ ID NO: 11786 - RNA, 20 nt, synthetic construct
  source 1..20: mol_type = other RNA
ggagaggtggccaggcctgg

SEQ ID NO: 11787 - RNA, 20 nt, synthetic construct
  source 1..20: mol_type = other RNA
agggaggcaagtataccccc

SEQ ID NO: 11788 - RNA, 20 nt, synthetic construct
  source 1..20: mol_type = other RNA
cagacaatggtgacacaggg

SEQ ID NO: 11789 - RNA, 20 nt, synthetic construct
  source 1..20: mol_type = other RNA
agacagacaatggtgacaca

SEQ ID NO: 11790 - RNA, 20 nt, synthetic construct
  source 1..20: mol_type = other RNA
gagacagacaatggtgacac

SEQ ID NO: 11791 - RNA, 20 nt, synthetic construct
  source 1..20: mol_type = other RNA
tctaagcaagagacagacaa

SEQ ID NO: 11792 - RNA, 20 nt, synthetic construct
  source 1..20: mol_type = other RNA
gaaaccaggccaggaagctg

SEQ ID NO: 11793 - RNA, 20 nt, synthetic construct
  source 1..20: mol_type = other RNA
agatgacagccacagcttcc

SEQ ID NO: 11794 - RNA, 20 nt, synthetic construct
  source 1..20: mol_type = other RNA
acagccacagcttcctggcc

SEQ ID NO: 11795 - RNA, 20 nt, synthetic construct
  source 1..20: mol_type = other RNA
cggatgcaggaaaccaggcc

SEQ ID NO: 11796 - RNA, 20 nt, synthetic construct
  source 1..20: mol_type = other RNA
cagggcggatgcaggaaacc

SEQ ID NO: 11797 - RNA, 20 nt, synthetic construct
  source 1..20: mol_type = other RNA
ccaggggtcagggcggatgc

SEQ ID NO: 11798 - RNA, 20 nt, synthetic construct
  source 1..20: mol_type = other RNA
cccacagccaggggtcaggg

SEQ ID NO: 11799 - RNA, 20 nt, synthetic construct
  source 1..20: mol_type = other RNA
gatcccacagccaggggtca

SEQ ID NO: 11800 - RNA, 20 nt, synthetic construct
  source 1..20: mol_type = other RNA
cctgcatccgccctgacccc

SEQ ID NO: 11801 - RNA, 20 nt, synthetic construct
  source 1..20: mol_type = other RNA
agatcccacagccaggggtc

SEQ ID NO: 11802 - RNA, 20 nt, synthetic construct
  source 1..20: mol_type = other RNA
atgggagatcccacagccag

SEQ ID NO: 11803 - RNA, 20 nt, synthetic construct
  source 1..20: mol_type = other RNA
tccgccctgacccctggctg

SEQ ID NO: 11804 - RNA, 20 nt, synthetic construct
  source 1..20: mol_type = other RNA
tatgggagatcccacagcca

SEQ ID NO: 11805 - RNA, 20 nt, synthetic construct
  source 1..20: mol_type = other RNA
ccgccctgacccctggctgt

SEQ ID NO: 11806 - RNA, 20 nt, synthetic construct
  source 1..20: mol_type = other RNA
ttatgggagatcccacagcc

SEQ ID NO: 11807 - RNA, 20 nt, synthetic construct
  source 1..20: mol_type = other RNA
cacagtcagatttgagttat

SEQ ID NO: 11808 - RNA, 20 nt, synthetic construct
  source 1..20: mol_type = other RNA
acacagtcagatttgagtta

SEQ ID NO: 11809 - RNA, 20 nt, synthetic construct
  source 1..20: mol_type = other RNA
caaatctgactgtgtccctg

SEQ ID NO: 11810 - RNA, 20 nt, synthetic construct
  source 1..20: mol_type = other RNA
tctgactgtgtccctgtgga

SEQ ID NO: 11811 - RNA, 20 nt, synthetic construct
  source 1..20: mol_type = other RNA
agaaacccaaaccttccaca

SEQ ID NO: 11812 - RNA, 20 nt, synthetic construct
  source 1..20: mol_type = other RNA
cagaaacccaaaccttccac

SEQ ID NO: 11813 - RNA, 20 nt, synthetic construct
  source 1..20: mol_type = other RNA
ctgtgtccctgtggaaggtt

SEQ ID NO: 11814 - RNA, 20 nt, synthetic construct
  source 1..20: mol_type = other RNA
tgtgtccctgtggaaggttt

SEQ ID NO: 11815 - RNA, 20 nt, synthetic construct
  source 1..20: mol_type = other RNA
gaaggtttgggtttctgacc

SEQ ID NO: 11816 - RNA, 20 nt, synthetic construct
  source 1..20: mol_type = other RNA
aaggtttgggtttctgacct

SEQ ID NO: 11817 - RNA, 20 nt, synthetic construct
  source 1..20: mol_type = other RNA
tgccggacatagagctgccc

SEQ ID NO: 11818 - RNA, 20 nt, synthetic construct
  source 1..20: mol_type = other RNA
gacctgggcagctctatgtc

SEQ ID NO: 11819 - RNA, 20 nt, synthetic construct
  source 1..20: mol_type = other RNA
ggcagctctatgtccggcac

SEQ ID NO: 11820 - RNA, 20 nt, synthetic construct
  source 1..20: mol_type = other RNA
gcagctctatgtccggcaca

SEQ ID NO: 11821 - RNA, 20 nt, synthetic construct
  source 1..20: mol_type = other RNA
cagctctatgtccggcacag

SEQ ID NO: 11822 - RNA, 20 nt, synthetic construct
  source 1..20: mol_type = other RNA
tatcagcagaacccctgtgc

SEQ ID NO: 11823 - RNA, 20 nt, synthetic construct
  source 1..20: mol_type = other RNA
aggggttctgctgatagcac

SEQ ID NO: 11824 - RNA, 20 nt, synthetic construct
  source 1..20: mol_type = other RNA
tgatagcacaggccacagat

SEQ ID NO: 11825 - RNA, 20 nt, synthetic construct
  source 1..20: mol_type = other RNA
ggtccctccttgccaatctg

SEQ ID NO: 11826 - RNA, 20 nt, synthetic construct
  source 1..20: mol_type = other RNA
gcacaggccacagattggca

SEQ ID NO: 11827 - RNA, 20 nt, synthetic construct
  source 1..20: mol_type = other RNA
caggccacagattggcaagg

SEQ ID NO: 11828 - RNA, 20 nt, synthetic construct
  source 1..20: mol_type = other RNA
aggccacagattggcaagga

SEQ ID NO: 11829 - RNA, 20 nt, synthetic construct
  source 1..20: mol_type = other RNA
cagattggcaaggagggacc

SEQ ID NO: 11830 - RNA, 20 nt, synthetic construct
  source 1..20: mol_type = other RNA
tggcaaggagggaccaggtt

SEQ ID NO: 11831 - RNA, 20 nt, synthetic construct
  source 1..20: mol_type = other RNA
acagctgctccttcctaacc

SEQ ID NO: 11832 - RNA, 20 nt, synthetic construct
  source 1..20: mol_type = other RNA
aaggagggaccaggttagga

SEQ ID NO: 11833 - RNA, 20 nt, synthetic construct
  source 1..20: mol_type = other RNA
aggttaggaaggagcagctg

SEQ ID NO: 11834 - RNA, 20 nt, synthetic construct
  source 1..20: mol_type = other RNA
gagcagctgtggttcctagt

SEQ ID NO: 11835 - RNA, 20 nt, synthetic construct
  source 1..20: mol_type = other RNA
agcagctgtggttcctagtt

SEQ ID NO: 11836 - RNA, 20 nt, synthetic construct
  source 1..20: mol_type = other RNA
gcttcagttatctcccaact

SEQ ID NO: 11837 - RNA, 20 nt, synthetic construct
  source 1..20: mol_type = other RNA
ttgggagataactgaagcct

SEQ ID NO: 11838 - RNA, 20 nt, synthetic construct
  source 1..20: mol_type = other RNA
atcttattccaggatttcct

SEQ ID NO: 11839 - RNA, 20 nt, synthetic construct
  source 1..20: mol_type = other RNA
aactgaagcctaggaaatcc

SEQ ID NO: 11840 - RNA, 20 nt, synthetic construct
  source 1..20: mol_type = other RNA
gcattggtctatcttattcc

SEQ ID NO: 11841 - RNA, 20 nt, synthetic construct
  source 1..20: mol_type = other RNA
gctgagggttatcgatgcat

SEQ ID NO: 11842 - RNA, 20 nt, synthetic construct
  source 1..20: mol_type = other RNA
cagctcagatttggagctga

SEQ ID NO: 11843 - RNA, 20 nt, synthetic construct
  source 1..20: mol_type = other RNA
gcagctcagatttggagctg

SEQ ID NO: 11844 - RNA, 20 nt, synthetic construct
  source 1..20: mol_type = other RNA
gtcctggtgcagctcagatt

SEQ ID NO: 11845 - RNA, 20 nt, synthetic construct
  source 1..20: mol_type = other RNA
ctccaaatctgagctgcacc

SEQ ID NO: 11846 - RNA, 20 nt, synthetic construct
  source 1..20: mol_type = other RNA
ccaccagagtcagcttgtcc

SEQ ID NO: 11847 - RNA, 20 nt, synthetic construct
  source 1..20: mol_type = other RNA
gcaccaggacaagctgactc

SEQ ID NO: 11848 - RNA, 20 nt, synthetic construct
  source 1..20: mol_type = other RNA
ccaggacaagctgactctgg

SEQ ID NO: 11849 - RNA, 20 nt, synthetic construct
  source 1..20: mol_type = other RNA
cgagctgaaaatgcagagac

SEQ ID NO: 11850 - RNA, 20 nt, synthetic construct
  source 1..20: mol_type = other RNA
agctcgctgtgtgccaagag

SEQ ID NO: 11851 - RNA, 20 nt, synthetic construct
  source 1..20: mol_type = other RNA
gctcgctgtgtgccaagaga

SEQ ID NO: 11852 - RNA, 20 nt, synthetic construct
  source 1..20: mol_type = other RNA
ggtacctgccagccctctct

SEQ ID NO: 11853 - RNA, 20 nt, synthetic construct
  source 1..20: mol_type = other RNA
gctgtgtgccaagagagggc

SEQ ID NO: 11854 - RNA, 20 nt, synthetic construct
  source 1..20: mol_type = other RNA
tgtgccaagagagggctggc

SEQ ID NO: 11855 - RNA, 20 nt, synthetic construct
  source 1..20: mol_type = other RNA
ctaatgaaagtgaaagctgc

SEQ ID NO: 11856 - RNA, 20 nt, synthetic construct
  source 1..20: mol_type = other RNA
cagcagctttcactttcatt

SEQ ID NO: 11857 - RNA, 20 nt, synthetic construct
  source 1..20: mol_type = other RNA
ctttcactttcattaggaac

SEQ ID NO: 11858 - RNA, 20 nt, synthetic construct
  source 1..20: mol_type = other RNA
tttcactttcattaggaacc

SEQ ID NO: 11859 - RNA, 20 nt, synthetic construct
  source 1..20: mol_type = other RNA
ctcagttggattattcgtcc

SEQ ID NO: 11860 - RNA, 20 nt, synthetic construct
  source 1..20: mol_type = other RNA
tggtgcagaggcagctcagt

SEQ ID NO: 11861 - RNA, 20 nt, synthetic construct
  source 1..20: mol_type = other RNA
tcccagcagttctggtgcag

SEQ ID NO: 11862 - RNA, 20 nt, synthetic construct
  source 1..20: mol_type = other RNA
tcttcacgtcccagcagttc

SEQ ID NO: 11863 - RNA, 20 nt, synthetic construct
  source 1..20: mol_type = other RNA
tgcctctgcaccagaactgc

SEQ ID NO: 11864 - RNA, 20 nt, synthetic construct
  source 1..20: mol_type = other RNA
gcctctgcaccagaactgct

SEQ ID NO: 11865 - RNA, 20 nt, synthetic construct
  source 1..20: mol_type = other RNA
tgggacgtgaagactctccc

SEQ ID NO: 11866 - RNA, 20 nt, synthetic construct
  source 1..20: mol_type = other RNA
agtggctggcctgggagcca

SEQ ID NO: 11867 - RNA, 20 nt, synthetic construct
  source 1..20: mol_type = other RNA
cagtggctggcctgggagcc

SEQ ID NO: 11868 - RNA, 20 nt, synthetic construct
  source 1..20: mol_type = other RNA
gaagactctccctggctccc

SEQ ID NO: 11869 - RNA, 20 nt, synthetic construct
  source 1..20: mol_type = other RNA
agggctgcagtggctggcct

SEQ ID NO: 11870 - RNA, 20 nt, synthetic construct
  source 1..20: mol_type = other RNA
aagggctgcagtggctggcc

SEQ ID NO: 11871 - RNA, 20 nt, synthetic construct
  source 1..20: mol_type = other RNA
ggagaaagggctgcagtggc

SEQ ID NO: 11872 - RNA, 20 nt, synthetic construct
  source 1..20: mol_type = other RNA
cccaggagaaagggctgcag

SEQ ID NO: 11873 - RNA, 20 nt, synthetic construct
  source 1..20: mol_type = other RNA
tccctccttcccaggagaaa

SEQ ID NO: 11874 - RNA, 20 nt, synthetic construct
  source 1..20: mol_type = other RNA
gccactgcagccctttctcc

SEQ ID NO: 11875 - RNA, 20 nt, synthetic construct
  source 1..20: mol_type = other RNA
ctccctccttcccaggagaa

SEQ ID NO: 11876 - RNA, 20 nt, synthetic construct
  source 1..20: mol_type = other RNA
ccactgcagccctttctcct

SEQ ID NO: 11877 - RNA, 20 nt, synthetic construct
  source 1..20: mol_type = other RNA
tgcagccctttctcctggga

SEQ ID NO: 11878 - RNA, 20 nt, synthetic construct
  source 1..20: mol_type = other RNA
tcgggagctccctccttccc

SEQ ID NO: 11879 - RNA, 20 nt, synthetic construct
  source 1..20: mol_type = other RNA
agccctttctcctgggaagg

SEQ ID NO: 11880 - RNA, 20 nt, synthetic construct
  source 1..20: mol_type = other RNA
gccctttctcctgggaagga

SEQ ID NO: 11881 - RNA, 20 nt, synthetic construct
  source 1..20: mol_type = other RNA
ggagcagggaatggggaatc

SEQ ID NO: 11882 - RNA, 20 nt, synthetic construct
  source 1..20: mol_type = other RNA
aggagcagggaatggggaat

SEQ ID NO: 11883 - RNA, 20 nt, synthetic construct
  source 1..20: mol_type = other RNA
ttgcccaggagcagggaatg

SEQ ID NO: 11884 - RNA, 20 nt, synthetic construct
  source 1..20: mol_type = other RNA
gttgcccaggagcagggaat

SEQ ID NO: 11885 - RNA, 20 nt, synthetic construct
  source 1..20: mol_type = other RNA
tgttgcccaggagcagggaa

SEQ ID NO: 11886 - RNA, 20 nt, synthetic construct
  source 1..20: mol_type = other RNA
gattccccattccctgctcc

SEQ ID NO: 11887 - RNA, 20 nt, synthetic construct
  source 1..20: mol_type = other RNA
ttaattgttgcccaggagca

SEQ ID NO: 11888 - RNA, 20 nt, synthetic construct
  source 1..20: mol_type = other RNA
attccccattccctgctcct

SEQ ID NO: 11889 - RNA, 20 nt, synthetic construct
  source 1..20: mol_type = other RNA
gttaattgttgcccaggagc

SEQ ID NO: 11890 - RNA, 20 nt, synthetic construct
  source 1..20: mol_type = other RNA
tagagtgttaattgttgccc

SEQ ID NO: 11891 - RNA, 20 nt, synthetic construct
  source 1..20: mol_type = other RNA
tgggcaacaattaacactct

SEQ ID NO: 11892 - RNA, 20 nt, synthetic construct
  source 1..20: mol_type = other RNA
ctctaggaaaaccacagagc

SEQ ID NO: 11893 - RNA, 20 nt, synthetic construct
  source 1..20: mol_type = other RNA
accctggatagccggctctg

SEQ ID NO: 11894 - RNA, 20 nt, synthetic construct
  source 1..20: mol_type = other RNA
gcaccagaaccctggatagc

SEQ ID NO: 11895 - RNA, 20 nt, synthetic construct
  source 1..20: mol_type = other RNA
aaccacagagccggctatcc

SEQ ID NO: 11896 - RNA, 20 nt, synthetic construct
  source 1..20: mol_type = other RNA
accacagagccggctatcca

SEQ ID NO: 11897 - RNA, 20 nt, synthetic construct
  source 1..20: mol_type = other RNA
gagccggctatccagggttc

SEQ ID NO: 11898 - RNA, 20 nt, synthetic construct
  source 1..20: mol_type = other RNA
tccccagggcaccagaaccc

SEQ ID NO: 11899 - RNA, 20 nt, synthetic construct
  source 1..20: mol_type = other RNA
tatccagggttctggtgccc

SEQ ID NO: 11900 - RNA, 20 nt, synthetic construct
  source 1..20: mol_type = other RNA
atccagggttctggtgccct

SEQ ID NO: 11901 - RNA, 20 nt, synthetic construct
  source 1..20: mol_type = other RNA
tccagggttctggtgccctg

SEQ ID NO: 11902 - RNA, 20 nt, synthetic construct
  source 1..20: mol_type = other RNA
ttgctgccctgtggtcccca

SEQ ID NO: 11903 - RNA, 20 nt, synthetic construct
  source 1..20: mol_type = other RNA
cttgctgccctgtggtcccc

SEQ ID NO: 11904 - RNA, 20 nt, synthetic construct
  source 1..20: mol_type = other RNA
tctggtgccctggggaccac

SEQ ID NO: 11905 - RNA, 20 nt, synthetic construct
  source 1..20: mol_type = other RNA
ctggtgccctggggaccaca

SEQ ID NO: 11906 - RNA, 20 nt, synthetic construct
  source 1..20: mol_type = other RNA
agaactttcttgctgccctg

SEQ ID NO: 11907 - RNA, 20 nt, synthetic construct
  source 1..20: mol_type = other RNA
gcagcaagaaagttctccta

SEQ ID NO: 11908 - RNA, 20 nt, synthetic construct
  source 1..20: mol_type = other RNA
cagcaagaaagttctcctaa

SEQ ID NO: 11909 - RNA, 20 nt, synthetic construct
  source 1..20: mol_type = other RNA
ttcccagccccaggaccctt

SEQ ID NO: 11910 - RNA, 20 nt, synthetic construct
  source 1..20: mol_type = other RNA
gaaagttctcctaagggtcc

SEQ ID NO: 11911 - RNA, 20 nt, synthetic construct
  source 1..20: mol_type = other RNA
aaagttctcctaagggtcct

SEQ ID NO: 11912 - RNA, 20 nt, synthetic construct
  source 1..20: mol_type = other RNA
aagttctcctaagggtcctg

SEQ ID NO: 11913 - RNA, 20 nt, synthetic construct
  source 1..20: mol_type = other RNA
tctcctaagggtcctggggc

SEQ ID NO: 11914 - RNA, 20 nt, synthetic construct
  source 1..20: mol_type = other RNA
ctcctaagggtcctggggct

SEQ ID NO: 11915 - RNA, 20 nt, synthetic construct
  source 1..20: mol_type = other RNA
cactctgccttcccagcccc

SEQ ID NO: 11916 - RNA, 20 nt, synthetic construct
  source 1..20: mol_type = other RNA
taagggtcctggggctggga

SEQ ID NO: 11917 - RNA, 20 nt, synthetic construct
  source 1..20: mol_type = other RNA
ctggggctgggaaggcagag

SEQ ID NO: 11918 - RNA, 20 nt, synthetic construct
  source 1..20: mol_type = other RNA
tggggctgggaaggcagagt

SEQ ID NO: 11919 - RNA, 20 nt, synthetic construct
  source 1..20: mol_type = other RNA
gtgggaagtctcccccagct

SEQ ID NO: 11920 - RNA, 20 nt, synthetic construct
  source 1..20: mol_type = other RNA
tccaggtctagcctagctgg

SEQ ID NO: 11921 - RNA, 20 nt, synthetic construct
  source 1..20: mol_type = other RNA
gtccaggtctagcctagctg

SEQ ID NO: 11922 - RNA, 20 nt, synthetic construct
  source 1..20: mol_type = other RNA
ggtccaggtctagcctagct

SEQ ID NO: 11923 - RNA, 20 nt, synthetic construct
  source 1..20: mol_type = other RNA
aggtccaggtctagcctagc

SEQ ID NO: 11924 - RNA, 20 nt, synthetic construct
  source 1..20: mol_type = other RNA
tcccccagctaggctagacc

SEQ ID NO: 11925 - RNA, 20 nt, synthetic construct
  source 1..20: mol_type = other RNA
cctgagtgccagggaggtcc

SEQ ID NO: 11926 - RNA, 20 nt, synthetic construct
  source 1..20: mol_type = other RNA
aggctagacctggacctccc

SEQ ID NO: 11927 - RNA, 20 nt, synthetic construct
  source 1..20: mol_type = other RNA
aggctgcctgagtgccaggg

SEQ ID NO: 11928 - RNA, 20 nt, synthetic construct
  source 1..20: mol_type = other RNA
gacaggctgcctgagtgcca

SEQ ID NO: 11929 - RNA, 20 nt, synthetic construct
  source 1..20: mol_type = other RNA
ggacaggctgcctgagtgcc

SEQ ID NO: 11930 - RNA, 20 nt, synthetic construct
  source 1..20: mol_type = other RNA
cctggacctccctggcactc

SEQ ID NO: 11931 - RNA, 20 nt, synthetic construct
  source 1..20: mol_type = other RNA
tcctgtgagcagaagaggac

SEQ ID NO: 11932 - RNA, 20 nt, synthetic construct
  source 1..20: mol_type = other RNA
ttatatcctgtgagcagaag

SEQ ID NO: 11933 - RNA, 20 nt, synthetic construct
  source 1..20: mol_type = other RNA
gcctgtcctcttctgctcac

SEQ ID NO: 11934 - RNA, 20 nt, synthetic construct
  source 1..20: mol_type = other RNA
aaatattcatgcatgagtat

SEQ ID NO: 11935 - RNA, 20 nt, synthetic construct
  source 1..20: mol_type = other RNA
tcatgcatgagtataggtgc

SEQ ID NO: 11936 - RNA, 20 nt, synthetic construct
  source 1..20: mol_type = other RNA
tgcaggtttgtacatttgca

SEQ ID NO: 11937 - RNA, 20 nt, synthetic construct
  source 1..20: mol_type = other RNA
gcaggtttgtacatttgcaa

SEQ ID NO: 11938 - RNA, 20 nt, synthetic construct
  source 1..20: mol_type = other RNA
tttgtacatttgcaagggca

SEQ ID NO: 11939 - RNA, 20 nt, synthetic construct
  source 1..20: mol_type = other RNA
ttgtacatttgcaagggcat

SEQ ID NO: 11940 - RNA, 20 nt, synthetic construct
  source 1..20: mol_type = other RNA
atattcatagtcggatacaa

SEQ ID NO: 11941 - RNA, 20 nt, synthetic construct
  source 1..20: mol_type = other RNA
taaccactcatattcatagt

SEQ ID NO: 11942 - RNA, 20 nt, synthetic construct
  source 1..20: mol_type = other RNA
tatccgactatgaatatgag

SEQ ID NO: 11943 - RNA, 20 nt, synthetic construct
  source 1..20: mol_type = other RNA
tacatctcttactatataca

SEQ ID NO: 11944 - RNA, 20 nt, synthetic construct
  source 1..20: mol_type = other RNA
tctcccttgttgtgaggatt

SEQ ID NO: 11945 - RNA, 20 nt, synthetic construct
  source 1..20: mol_type = other RNA
tgaaaatctcccttgttgtg

SEQ ID NO: 11946 - RNA, 20 nt, synthetic construct
  source 1..20: mol_type = other RNA
ctcacctaatcctcacaaca

SEQ ID NO: 11947 - RNA, 20 nt, synthetic construct
  source 1..20: mol_type = other RNA
tcacctaatcctcacaacaa

SEQ ID NO: 11948 - RNA, 20 nt, synthetic construct
  source 1..20: mol_type = other RNA
tggtttcctcttctagaaga

SEQ ID NO: 11949 - RNA, 20 nt, synthetic construct
  source 1..20: mol_type = other RNA
ttatttccatcttctagaag

SEQ ID NO: 11950 - RNA, 20 nt, synthetic construct
  source 1..20: mol_type = other RNA
agaagaggaaaccaaagtac

SEQ ID NO: 11951 - RNA, 20 nt, synthetic construct
  source 1..20: mol_type = other RNA
tgcttaacctccctgtactt

SEQ ID NO: 11952 - RNA, 20 nt, synthetic construct
  source 1..20: mol_type = other RNA
gaagaggaaaccaaagtaca

SEQ ID NO: 11953 - RNA, 20 nt, synthetic construct
  source 1..20: mol_type = other RNA
gaggaaaccaaagtacaggg

SEQ ID NO: 11954 - RNA, 20 nt, synthetic construct
  source 1..20: mol_type = other RNA
gaggttaagcagcatgccca

SEQ ID NO: 11955 - RNA, 20 nt, synthetic construct
  source 1..20: mol_type = other RNA
cccagggtagctgtgacctt

SEQ ID NO: 11956 - RNA, 20 nt, synthetic construct
  source 1..20: mol_type = other RNA
tcccagggtagctgtgacct

SEQ ID NO: 11957 - RNA, 20 nt, synthetic construct
  source 1..20: mol_type = other RNA
gcccaaggtcacagctaccc

SEQ ID NO: 11958 - RNA, 20 nt, synthetic construct
  source 1..20: mol_type = other RNA
cccaaggtcacagctaccct

SEQ ID NO: 11959 - RNA, 20 nt, synthetic construct
  source 1..20: mol_type = other RNA
ggccctgggttcacatccca

SEQ ID NO: 11960 - RNA, 20 nt, synthetic construct
  source 1..20: mol_type = other RNA
gggccctgggttcacatccc

SEQ ID NO: 11961 - RNA, 20 nt, synthetic construct
  source 1..20: mol_type = other RNA
ctaccctgggatgtgaaccc

SEQ ID NO: 11962 - RNA, 20 nt, synthetic construct
  source 1..20: mol_type = other RNA
taccctgggatgtgaaccca

SEQ ID NO: 11963 - RNA, 20 nt, synthetic construct
  source 1..20: mol_type = other RNA
tggttaagagccagggccct

SEQ ID NO: 11964 - RNA, 20 nt, synthetic construct
  source 1..20: mol_type = other RNA
gggatgtgaacccagggccc

SEQ ID NO: 11965 - RNA, 20 nt, synthetic construct
  source 1..20: mol_type = other RNA
atggttaagagccagggccc

SEQ ID NO: 11966 - RNA, 20 nt, synthetic construct
  source 1..20: mol_type = other RNA
agggtcatggttaagagcca

SEQ ID NO: 11967 - RNA, 20 nt, synthetic construct
  source 1..20: mol_type = other RNA
tagggtcatggttaagagcc

SEQ ID NO: 11968 - RNA, 20 nt, synthetic construct
  source 1..20: mol_type = other RNA
aggaggcagtattagggtca

SEQ ID NO: 11969 - RNA, 20 nt, synthetic construct
  source 1..20: mol_type = other RNA
tacttgaggaggcagtatta

SEQ ID NO: 11970 - RNA, 20 nt, synthetic construct
  source 1..20: mol_type = other RNA
ctacttgaggaggcagtatt

SEQ ID NO: 11971 - RNA, 20 nt, synthetic construct
  source 1..20: mol_type = other RNA
tgctgagcacctacttgagg

SEQ ID NO: 11972 - RNA, 20 nt, synthetic construct
  source 1..20: mol_type = other RNA
ctaatactgcctcctcaagt

SEQ ID NO: 11973 - RNA, 20 nt, synthetic construct
  source 1..20: mol_type = other RNA
atttgctgagcacctacttg

SEQ ID NO: 11974 - RNA, 20 nt, synthetic construct
  source 1..20: mol_type = other RNA
aggtgctcagcaaatgtttg

SEQ ID NO: 11975 - RNA, 20 nt, synthetic construct
  source 1..20: mol_type = other RNA
gtttgaggaactgaattatg

SEQ ID NO: 11976 - RNA, 20 nt, synthetic construct
  source 1..20: mol_type = other RNA
tttgaggaactgaattatgt

SEQ ID NO: 11977 - RNA, 20 nt, synthetic construct
  source 1..20: mol_type = other RNA
ttttttttttctcttatgtg

SEQ ID NO: 11978 - RNA, 20 nt, synthetic construct
  source 1..20: mol_type = other RNA
aaaaaagagggagcaaaagt

SEQ ID NO: 11979 - RNA, 20 nt, synthetic construct
  source 1..20: mol_type = other RNA
ggatgaatctcaagatgaac

SEQ ID NO: 11980 - RNA, 20 nt, synthetic construct
  source 1..20: mol_type = other RNA
gttcatcttgagattcatcc

SEQ ID NO: 11981 - RNA, 20 nt, synthetic construct
  source 1..20: mol_type = other RNA
ttcatcttgagattcatcct

SEQ ID NO: 11982 - RNA, 20 nt, synthetic construct
  source 1..20: mol_type = other RNA
catgtcacacagtggggccc

SEQ ID NO: 11983 - RNA, 20 nt, synthetic construct
  source 1..20: mol_type = other RNA
gtggagcatgtcacacagtg

SEQ ID NO: 11984 - RNA, 20 nt, synthetic construct
  source 1..20: mol_type = other RNA
cgtggagcatgtcacacagt

SEQ ID NO: 11985 - RNA, 20 nt, synthetic construct
  source 1..20: mol_type = other RNA
gcgtggagcatgtcacacag

SEQ ID NO: 11986 - RNA, 20 nt, synthetic construct
  source 1..20: mol_type = other RNA
ggaaacagtgactaagggcg

SEQ ID NO: 11987 - RNA, 20 nt, synthetic construct
  source 1..20: mol_type = other RNA
atccaggaaacagtgactaa

SEQ ID NO: 11988 - RNA, 20 nt, synthetic construct
  source 1..20: mol_type = other RNA
aatccaggaaacagtgacta

SEQ ID NO: 11989 - RNA, 20 nt, synthetic construct
  source 1..20: mol_type = other RNA
cgcccttagtcactgtttcc

SEQ ID NO: 11990 - RNA, 20 nt, synthetic construct
  source 1..20: mol_type = other RNA
ttagtcactgtttcctggat

SEQ ID NO: 11991 - RNA, 20 nt, synthetic construct
  source 1..20: mol_type = other RNA
tgttccccacacgccaatcc

SEQ ID NO: 11992 - RNA, 20 nt, synthetic construct
  source 1..20: mol_type = other RNA
ctgtttcctggattggcgtg

SEQ ID NO: 11993 - RNA, 20 nt, synthetic construct
  source 1..20: mol_type = other RNA
tgtttcctggattggcgtgt

SEQ ID NO: 11994 - RNA, 20 nt, synthetic construct
  source 1..20: mol_type = other RNA
gtttcctggattggcgtgtg

SEQ ID NO: 11995 - RNA, 20 nt, synthetic construct
  source 1..20: mol_type = other RNA
ctttctcagccattctcatg

SEQ ID NO: 11996 - RNA, 20 nt, synthetic construct
  source 1..20: mol_type = other RNA
cacatgtgaccacatgagaa

SEQ ID NO: 11997 - RNA, 20 nt, synthetic construct
  source 1..20: mol_type = other RNA
gagaatggctgagaaagagc

SEQ ID NO: 11998 - RNA, 20 nt, synthetic construct
  source 1..20: mol_type = other RNA
gaaagagcaggactgactac

SEQ ID NO: 11999 - RNA, 20 nt, synthetic construct
  source 1..20: mol_type = other RNA
ttccataagcaggggaacgc

SEQ ID NO: 12000 - RNA, 20 nt, synthetic construct
  source 1..20: mol_type = other RNA
aggcccctttccataagcag

SEQ ID NO: 12001 - RNA, 20 nt, synthetic construct
  source 1..20: mol_type = other RNA
taccggcgttcccctgctta

SEQ ID NO: 12002 - RNA, 20 nt, synthetic construct
  source 1..20: mol_type = other RNA
caggcccctttccataagca

SEQ ID NO: 12003 - RNA, 20 nt, synthetic construct
  source 1..20: mol_type = other RNA
ccaggcccctttccataagc

SEQ ID NO: 12004 - RNA, 20 nt, synthetic construct
  source 1..20: mol_type = other RNA
gcgttcccctgcttatggaa

SEQ ID NO: 12005 - RNA, 20 nt, synthetic construct
  source 1..20: mol_type = other RNA
cgttcccctgcttatggaaa

SEQ ID NO: 12006 - RNA, 20 nt, synthetic construct
  source 1..20: mol_type = other RNA
gttcccctgcttatggaaag

SEQ ID NO: 12007 - RNA, 20 nt, synthetic construct
  source 1..20: mol_type = other RNA
cctgcttatggaaaggggcc

SEQ ID NO: 12008 - RNA, 20 nt, synthetic construct
  source 1..20: mol_type = other RNA
tctgaccgagcctcatctcc

SEQ ID NO: 12009 - RNA, 20 nt, synthetic construct
  source 1..20: mol_type = other RNA
tggaaaggggcctggagatg

SEQ ID NO: 12010 - RNA, 20 nt, synthetic construct
  source 1..20: mol_type = other RNA
aggggcctggagatgaggct

SEQ ID NO: 12011 - RNA, 20 nt, synthetic construct
  source 1..20: mol_type = other RNA
ggctcggtcagatcatcttg

SEQ ID NO: 12012 - RNA, 20 nt, synthetic construct
  source 1..20: mol_type = other RNA
gatcatcttgaggtctttcc

SEQ ID NO: 12013 - RNA, 20 nt, synthetic construct
  source 1..20: mol_type = other RNA
catcttgaggtctttcctgg

SEQ ID NO: 12014 - RNA, 20 nt, synthetic construct
  source 1..20: mol_type = other RNA
ctagcagcagggaagccgcc

SEQ ID NO: 12015 - RNA, 20 nt, synthetic construct
  source 1..20: mol_type = other RNA
gagaggggtagctagcagca

SEQ ID NO: 12016 - RNA, 20 nt, synthetic construct
  source 1..20: mol_type = other RNA
tgagaggggtagctagcagc

SEQ ID NO: 12017 - RNA, 20 nt, synthetic construct
  source 1..20: mol_type = other RNA
agaaccccagggtatgagag

SEQ ID NO: 12018 - RNA, 20 nt, synthetic construct
  source 1..20: mol_type = other RNA
cagaaccccagggtatgaga

SEQ ID NO: 12019 - RNA, 20 nt, synthetic construct
  source 1..20: mol_type = other RNA
tcagaaccccagggtatgag

SEQ ID NO: 12020 - RNA, 20 nt, synthetic construct
  source 1..20: mol_type = other RNA
tagctacccctctcataccc

SEQ ID NO: 12021 - RNA, 20 nt, synthetic construct
  source 1..20: mol_type = other RNA
agctacccctctcataccct

SEQ ID NO: 12022 - RNA, 20 nt, synthetic construct
  source 1..20: mol_type = other RNA
gctacccctctcataccctg

SEQ ID NO: 12023 - RNA, 20 nt, synthetic construct
  source 1..20: mol_type = other RNA
cgaggaagctcagaacccca

SEQ ID NO: 12024 - RNA, 20 nt, synthetic construct
  source 1..20: mol_type = other RNA
ccgaggaagctcagaacccc

SEQ ID NO: 12025 - RNA, 20 nt, synthetic construct
  source 1..20: mol_type = other RNA
cctggggttctgagcttcct

SEQ ID NO: 12026 - RNA, 20 nt, synthetic construct
  source 1..20: mol_type = other RNA
ggccttgcccccaagtgccg

SEQ ID NO: 12027 - RNA, 20 nt, synthetic construct
  source 1..20: mol_type = other RNA
ttctgagcttcctcggcact

SEQ ID NO: 12028 - RNA, 20 nt, synthetic construct
  source 1..20: mol_type = other RNA
tctgagcttcctcggcactt

SEQ ID NO: 12029 - RNA, 20 nt, synthetic construct
  source 1..20: mol_type = other RNA
ctgagcttcctcggcacttg

SEQ ID NO: 12030 - RNA, 20 nt, synthetic construct
  source 1..20: mol_type = other RNA
tgagcttcctcggcacttgg

SEQ ID NO: 12031 - RNA, 20 nt, synthetic construct
  source 1..20: mol_type = other RNA
ttcctcggcacttgggggca

SEQ ID NO: 12032 - RNA, 20 nt, synthetic construct
  source 1..20: mol_type = other RNA
acttgggggcaaggcctcct

SEQ ID NO: 12033 - RNA, 20 nt, synthetic construct
  source 1..20: mol_type = other RNA
ccctcaaatccaagccaagg

SEQ ID NO: 12034 - RNA, 20 nt, synthetic construct
  source 1..20: mol_type = other RNA
ggggcaaggcctccttggct

SEQ ID NO: 12035 - RNA, 20 nt, synthetic construct
  source 1..20: mol_type = other RNA
ccaccctcaaatccaagcca

SEQ ID NO: 12036 - RNA, 20 nt, synthetic construct
  source 1..20: mol_type = other RNA
gcctccttggcttggatttg

SEQ ID NO: 12037 - RNA, 20 nt, synthetic construct
  source 1..20: mol_type = other RNA
cctccttggcttggatttga

SEQ ID NO: 12038 - RNA, 20 nt, synthetic construct
  source 1..20: mol_type = other RNA
ccttggcttggatttgaggg

SEQ ID NO: 12039 - RNA, 20 nt, synthetic construct
  source 1..20: mol_type = other RNA
cttggcttggatttgagggt

SEQ ID NO: 12040 - RNA, 20 nt, synthetic construct
  source 1..20: mol_type = other RNA
ttggcttggatttgagggtg

SEQ ID NO: 12041 - RNA, 20 nt, synthetic construct
  source 1..20: mol_type = other RNA
gcttggatttgagggtgggg

SEQ ID NO: 12042 - RNA, 20 nt, synthetic construct
  source 1..20: mol_type = other RNA
tggatttgagggtggggagg

SEQ ID NO: 12043 - RNA, 20 nt, synthetic construct
  source 1..20: mol_type = other RNA
ggatttgagggtggggagga

SEQ ID NO: 12044 - RNA, 20 nt, synthetic construct
  source 1..20: mol_type = other RNA
ttgagggtggggaggaggga

SEQ ID NO: 12045 - RNA, 20 nt, synthetic construct
  source 1..20: mol_type = other RNA
ggaggagggaaggctgtgca

SEQ ID NO: 12046 - RNA, 20 nt, synthetic construct
  source 1..20: mol_type = other RNA
ggggaggcctggagaagtgg

SEQ ID NO: 12047 - RNA, 20 nt, synthetic construct
  source 1..20: mol_type = other RNA
agtggggaggcctggagaag

SEQ ID NO: 12048 - RNA, 20 nt, synthetic construct
  source 1..20: mol_type = other RNA
atggcttccaccacttctcc

SEQ ID NO: 12049 - RNA, 20 nt, synthetic construct
  source 1..20: mol_type = other RNA
ccctgggaagtggggaggcc

SEQ ID NO: 12050 - RNA, 20 nt, synthetic construct
  source 1..20: mol_type = other RNA
cctgaccctgggaagtgggg

SEQ ID NO: 12051 - RNA, 20 nt, synthetic construct
  source 1..20: mol_type = other RNA
gggcctgaccctgggaagtg

SEQ ID NO: 12052 - RNA, 20 nt, synthetic construct
  source 1..20: mol_type = other RNA
agggcctgaccctgggaagt

SEQ ID NO: 12053 - RNA, 20 nt, synthetic construct
  source 1..20: mol_type = other RNA
tccaggcctccccacttccc

SEQ ID NO: 12054 - RNA, 20 nt, synthetic construct
  source 1..20: mol_type = other RNA
cagggcctgaccctgggaag

SEQ ID NO: 12055 - RNA, 20 nt, synthetic construct
  source 1..20: mol_type = other RNA
ccaggcctccccacttccca

SEQ ID NO: 12056 - RNA, 20 nt, synthetic construct
  source 1..20: mol_type = other RNA
cctccccacttcccagggtc

SEQ ID NO: 12057 - RNA, 20 nt, synthetic construct
  source 1..20: mol_type = other RNA
gggtgtcagggcctgaccct

SEQ ID NO: 12058 - RNA, 20 nt, synthetic construct
  source 1..20: mol_type = other RNA
ggggtgtcagggcctgaccc

SEQ ID NO: 12059 - RNA, 20 nt, synthetic construct
  source 1..20: mol_type = other RNA
gcaaagctctcggggtgtca

SEQ ID NO: 12060 - RNA, 20 nt, synthetic construct
  source 1..20: mol_type = other RNA
tgcaaagctctcggggtgtc

SEQ ID NO: 12061 - RNA, 20 nt, synthetic construct
  source 1..20: mol_type = other RNA
acacccttgcaaagctctcg

SEQ ID NO: 12062 - RNA, 20 nt, synthetic construct
  source 1..20: mol_type = other RNA
gacacccttgcaaagctctc

SEQ ID NO: 12063 - RNA, 20 nt, synthetic construct
  source 1..20: mol_type = other RNA
ggacacccttgcaaagctct

SEQ ID NO: 12064 - RNA, 20 nt, synthetic construct
  source 1..20: mol_type = other RNA
gacaccccgagagctttgca

SEQ ID NO: 12065 - RNA, 20 nt, synthetic construct
  source 1..20: mol_type = other RNA
acaccccgagagctttgcaa

SEQ ID NO: 12066 - RNA, 20 nt, synthetic construct
  source 1..20: mol_type = other RNA
acaccaggaaatatctctca

SEQ ID NO: 12067 - RNA, 20 nt, synthetic construct
  source 1..20: mol_type = other RNA
aacaccaggaaatatctctc

SEQ ID NO: 12068 - RNA, 20 nt, synthetic construct
  source 1..20: mol_type = other RNA
tgtccctgagagatatttcc

SEQ ID NO: 12069 - RNA, 20 nt, synthetic construct
  source 1..20: mol_type = other RNA
gctgtttaagcagaaacacc

SEQ ID NO: 12070 - RNA, 20 nt, synthetic construct
  source 1..20: mol_type = other RNA
gcaaaatatgtcgaagcatt

SEQ ID NO: 12071 - RNA, 20 nt, synthetic construct
  source 1..20: mol_type = other RNA
caaaatatgtcgaagcattt

SEQ ID NO: 12072 - RNA, 20 nt, synthetic construct
  source 1..20: mol_type = other RNA
ccccttccaaatgaaaacat

SEQ ID NO: 12073 - RNA, 20 nt, synthetic construct
  source 1..20: mol_type = other RNA
aatatgccaatgttttcatt

SEQ ID NO: 12074 - RNA, 20 nt, synthetic construct
  source 1..20: mol_type = other RNA
tgccaatgttttcatttgga

SEQ ID NO: 12075 - RNA, 20 nt, synthetic construct
  source 1..20: mol_type = other RNA
gccaatgttttcatttggaa

SEQ ID NO: 12076 - RNA, 20 nt, synthetic construct
  source 1..20: mol_type = other RNA
ccaatgttttcatttggaag

SEQ ID NO: 12077 - RNA, 20 nt, synthetic construct
  source 1..20: mol_type = other RNA
gggaagtgtttctgttgatg

SEQ ID NO: 12078 - RNA, 20 nt, synthetic construct
  source 1..20: mol_type = other RNA
tgaagcagtgtaacttggtg

SEQ ID NO: 12079 - RNA, 20 nt, synthetic construct
  source 1..20: mol_type = other RNA
gactttgaagcagtgtaact

SEQ ID NO: 12080 - RNA, 20 nt, synthetic construct
  source 1..20: mol_type = other RNA
ctgcttcaaagtcaaatgct

SEQ ID NO: 12081 - RNA, 20 nt, synthetic construct
  source 1..20: mol_type = other RNA
tcaaagtcaaatgcttggct

SEQ ID NO: 12082 - RNA, 20 nt, synthetic construct
  source 1..20: mol_type = other RNA
caaatgcttggcttggagac

SEQ ID NO: 12083 - RNA, 20 nt, synthetic construct
  source 1..20: mol_type = other RNA
aaatgcttggcttggagaca

SEQ ID NO: 12084 - RNA, 20 nt, synthetic construct
  source 1..20: mol_type = other RNA
ttggagacagggatttatct

SEQ ID NO: 12085 - RNA, 20 nt, synthetic construct
  source 1..20: mol_type = other RNA
tggagacagggatttatctt

SEQ ID NO: 12086 - RNA, 20 nt, synthetic construct
  source 1..20: mol_type = other RNA
gggatttatcttgggatcgc

SEQ ID NO: 12087 - RNA, 20 nt, synthetic construct
  source 1..20: mol_type = other RNA
tctgccaggccgtgtgctaa

SEQ ID NO: 12088 - RNA, 20 nt, synthetic construct
  source 1..20: mol_type = other RNA
ttctgccaggccgtgtgcta

SEQ ID NO: 12089 - RNA, 20 nt, synthetic construct
  source 1..20: mol_type = other RNA
gatcgcaggcccttagcaca

SEQ ID NO: 12090 - RNA, 20 nt, synthetic construct
  source 1..20: mol_type = other RNA
caggcccttagcacacggcc

SEQ ID NO: 12091 - RNA, 20 nt, synthetic construct
  source 1..20: mol_type = other RNA
accctgcctgctcttctgcc

SEQ ID NO: 12092 - RNA, 20 nt, synthetic construct
  source 1..20: mol_type = other RNA
acacggcctggcagaagagc

SEQ ID NO: 12093 - RNA, 20 nt, synthetic construct
  source 1..20: mol_type = other RNA
ggcctggcagaagagcaggc

SEQ ID NO: 12094 - RNA, 20 nt, synthetic construct
  source 1..20: mol_type = other RNA
gcctggcagaagagcaggca

SEQ ID NO: 12095 - RNA, 20 nt, synthetic construct
  source 1..20: mol_type = other RNA
atgagtgagtgcatatgcaa

SEQ ID NO: 12096 - RNA, 20 nt, synthetic construct
  source 1..20: mol_type = other RNA
tgagtgagtgcatatgcaaa

SEQ ID NO: 12097 - RNA, 20 nt, synthetic construct
  source 1..20: mol_type = other RNA
tatgcaaagggcctagacac

SEQ ID NO: 12098 - RNA, 20 nt, synthetic construct
  source 1..20: mol_type = other RNA
tgtatcgcactcctgtgtct

SEQ ID NO: 12099 - RNA, 20 nt, synthetic construct
  source 1..20: mol_type = other RNA
tgctcagtacagattttgaa

SEQ ID NO: 12100 - RNA, 20 nt, synthetic construct
  source 1..20: mol_type = other RNA
agattttgaatggattccat

SEQ ID NO: 12101 - RNA, 20 nt, synthetic construct
  source 1..20: mol_type = other RNA
actctcaaaagtagaaccta

SEQ ID NO: 12102 - RNA, 20 nt, synthetic construct
  source 1..20: mol_type = other RNA
gtgacagaggcttggatgag

SEQ ID NO: 12103 - RNA, 20 nt, synthetic construct
  source 1..20: mol_type = other RNA
ggtgacagaggcttggatga

SEQ ID NO: 12104 - RNA, 20 nt, synthetic construct
  source 1..20: mol_type = other RNA
aggtgacagaggcttggatg

SEQ ID NO: 12105 - RNA, 20 nt, synthetic construct
  source 1..20: mol_type = other RNA
ggccagaggtgacagaggct

SEQ ID NO: 12106 - RNA, 20 nt, synthetic construct
  source 1..20: mol_type = other RNA
gtccaggccagaggtgacag

SEQ ID NO: 12107 - RNA, 20 nt, synthetic construct
  source 1..20: mol_type = other RNA
atccaagcctctgtcacctc

SEQ ID NO: 12108 - RNA, 20 nt, synthetic construct
  source 1..20: mol_type = other RNA
agcctctgtcacctctggcc

SEQ ID NO: 12109 - RNA, 20 nt, synthetic construct
  source 1..20: mol_type = other RNA
ctgttagttgtccaggccag

SEQ ID NO: 12110 - RNA, 20 nt, synthetic construct
  source 1..20: mol_type = other RNA
tcagatgctgttagttgtcc

SEQ ID NO: 12111 - RNA, 20 nt, synthetic construct
  source 1..20: mol_type = other RNA
tggacaactaacagcatctg

SEQ ID NO: 12112 - RNA, 20 nt, synthetic construct
  source 1..20: mol_type = other RNA
acaactaacagcatctgagg

SEQ ID NO: 12113 - RNA, 20 nt, synthetic construct
  source 1..20: mol_type = other RNA
actaacagcatctgaggtgg

SEQ ID NO: 12114 - RNA, 20 nt, synthetic construct
  source 1..20: mol_type = other RNA
gaggggtaagaggggaagca

SEQ ID NO: 12115 - RNA, 20 nt, synthetic construct
  source 1..20: mol_type = other RNA
tgaggggtaagaggggaagc

SEQ ID NO: 12116 - RNA, 20 nt, synthetic construct
  source 1..20: mol_type = other RNA
aatgagctgaggggtaagag

SEQ ID NO: 12117 - RNA, 20 nt, synthetic construct
  source 1..20: mol_type = other RNA
gaatgagctgaggggtaaga

SEQ ID NO: 12118 - RNA, 20 nt, synthetic construct
  source 1..20: mol_type = other RNA
agaatgagctgaggggtaag

SEQ ID NO: 12119 - RNA, 20 nt, synthetic construct
  source 1..20: mol_type = other RNA
tgtggacagaatgagctgag

SEQ ID NO: 12120 - RNA, 20 nt, synthetic construct
  source 1..20: mol_type = other RNA
ttgtggacagaatgagctga

SEQ ID NO: 12121 - RNA, 20 nt, synthetic construct
  source 1..20: mol_type = other RNA
attgtggacagaatgagctg

SEQ ID NO: 12122 - RNA, 20 nt, synthetic construct
  source 1..20: mol_type = other RNA
aaaaatgactctggcaattg

SEQ ID NO: 12123 - RNA, 20 nt, synthetic construct
  source 1..20: mol_type = other RNA
ccattttgcaaaaatgactc

SEQ ID NO: 12124 - RNA, 20 nt, synthetic construct
  source 1..20: mol_type = other RNA
ccagagtcatttttgcaaaa

SEQ ID NO: 12125 - RNA, 20 nt, synthetic construct
  source 1..20: mol_type = other RNA
cagagtcatttttgcaaaat

SEQ ID NO: 12126 - RNA, 20 nt, synthetic construct
  source 1..20: mol_type = other RNA
tcatttttgcaaaatgggaa

SEQ ID NO: 12127 - RNA, 20 nt, synthetic construct
  source 1..20: mol_type = other RNA
catttttgcaaaatgggaat

SEQ ID NO: 12128 - RNA, 20 nt, synthetic construct
  source 1..20: mol_type = other RNA
gccattggaaggttctaggc

SEQ ID NO: 12129 - RNA, 20 nt, synthetic construct
  source 1..20: mol_type = other RNA
gaaagccattggaaggttct

SEQ ID NO: 12130 - RNA, 20 nt, synthetic construct
  source 1..20: mol_type = other RNA
tcctgcctagaaccttccaa

SEQ ID NO: 12131 - RNA, 20 nt, synthetic construct
  source 1..20: mol_type = other RNA
agcagtggaaagccattgga

SEQ ID NO: 12132 - RNA, 20 nt, synthetic construct
  source 1..20: mol_type = other RNA
caagagcagtggaaagccat

SEQ ID NO: 12133 - RNA, 20 nt, synthetic construct
  source 1..20: mol_type = other RNA
aaggccatagccaagagcag

SEQ ID NO: 12134 - RNA, 20 nt, synthetic construct
  source 1..20: mol_type = other RNA
caatggctttccactgctct

SEQ ID NO: 12135 - RNA, 20 nt, synthetic construct
  source 1..20: mol_type = other RNA
ctttccactgctcttggcta

SEQ ID NO: 12136 - RNA, 20 nt, synthetic construct
  source 1..20: mol_type = other RNA
gctcttggctatggccttcc

SEQ ID NO: 12137 - RNA, 20 nt, synthetic construct
  source 1..20: mol_type = other RNA
cataccatggaggacctgga

SEQ ID NO: 12138 - RNA, 20 nt, synthetic construct
  source 1..20: mol_type = other RNA
gagccataccatggaggacc

SEQ ID NO: 12139 - RNA, 20 nt, synthetic construct
  source 1..20: mol_type = other RNA
atggccttccaggtcctcca

SEQ ID NO: 12140 - RNA, 20 nt, synthetic construct
  source 1..20: mol_type = other RNA
gggtgggagccataccatgg

SEQ ID NO: 12141 - RNA, 20 nt, synthetic construct
  source 1..20: mol_type = other RNA
cttccaggtcctccatggta

SEQ ID NO: 12142 - RNA, 20 nt, synthetic construct
  source 1..20: mol_type = other RNA
ggtgggtgggagccatacca

SEQ ID NO: 12143 - RNA, 20 nt, synthetic construct
  source 1..20: mol_type = other RNA
gaaaggtcagtgaggtgggt

SEQ ID NO: 12144 - RNA, 20 nt, synthetic construct
  source 1..20: mol_type = other RNA
ggaaaggtcagtgaggtggg

SEQ ID NO: 12145 - RNA, 20 nt, synthetic construct
  source 1..20: mol_type = other RNA
ccaggaaaggtcagtgaggt

SEQ ID NO: 12146 - RNA, 20 nt, synthetic construct
  source 1..20: mol_type = other RNA
cccaggaaaggtcagtgagg

SEQ ID NO: 12147 - RNA, 20 nt, synthetic construct
  source 1..20: mol_type = other RNA
agccccaggaaaggtcagtg

SEQ ID NO: 12148 - RNA, 20 nt, synthetic construct
  source 1..20: mol_type = other RNA
cccacctcactgacctttcc

SEQ ID NO: 12149 - RNA, 20 nt, synthetic construct
  source 1..20: mol_type = other RNA
ccacctcactgacctttcct

SEQ ID NO: 12150 - RNA, 20 nt, synthetic construct
  source 1..20: mol_type = other RNA
cacctcactgacctttcctg

SEQ ID NO: 12151 - RNA, 20 nt, synthetic construct
  source 1..20: mol_type = other RNA
ctggagaacagccccaggaa

SEQ ID NO: 12152 - RNA, 20 nt, synthetic construct
  source 1..20: mol_type = other RNA
tgtggctggagaacagcccc

SEQ ID NO: 12153 - RNA, 20 nt, synthetic construct
  source 1..20: mol_type = other RNA
ggggctgttctccagccaca

SEQ ID NO: 12154 - RNA, 20 nt, synthetic construct
  source 1..20: mol_type = other RNA
caaaaggaggcccatgtggc

SEQ ID NO: 12155 - RNA, 20 nt, synthetic construct
  source 1..20: mol_type = other RNA
gggctgttctccagccacat

SEQ ID NO: 12156 - RNA, 20 nt, synthetic construct
  source 1..20: mol_type = other RNA
caaccaaaaggaggcccatg

SEQ ID NO: 12157 - RNA, 20 nt, synthetic construct
  source 1..20: mol_type = other RNA
cagccacatgggcctccttt

SEQ ID NO: 12158 - RNA, 20 nt, synthetic construct
  source 1..20: mol_type = other RNA
gtttttccgcaaccaaaagg

SEQ ID NO: 12159 - RNA, 20 nt, synthetic construct
  source 1..20: mol_type = other RNA
ttggtttttccgcaaccaaa

SEQ ID NO: 12160 - RNA, 20 nt, synthetic construct
  source 1..20: mol_type = other RNA
catgggcctccttttggttg

SEQ ID NO: 12161 - RNA, 20 nt, synthetic construct
  source 1..20: mol_type = other RNA
accttcaggtgagagagagt

SEQ ID NO: 12162 - RNA, 20 nt, synthetic construct
  source 1..20: mol_type = other RNA
accaactctctctcacctga

SEQ ID NO: 12163 - RNA, 20 nt, synthetic construct
  source 1..20: mol_type = other RNA
tcagtggtgccaagaccttc

SEQ ID NO: 12164 - RNA, 20 nt, synthetic construct
  source 1..20: mol_type = other RNA
tctctctcacctgaaggtct

SEQ ID NO: 12165 - RNA, 20 nt, synthetic construct
  source 1..20: mol_type = other RNA
gtccaggctgagggaatcag

SEQ ID NO: 12166 - RNA, 20 nt, synthetic construct
  source 1..20: mol_type = other RNA
caccactgattccctcagcc

SEQ ID NO: 12167 - RNA, 20 nt, synthetic construct
  source 1..20: mol_type = other RNA
agaaaagcagtccaggctga

SEQ ID NO: 12168 - RNA, 20 nt, synthetic construct
  source 1..20: mol_type = other RNA
gagaaaagcagtccaggctg

SEQ ID NO: 12169 - RNA, 20 nt, synthetic construct
  source 1..20: mol_type = other RNA
gatctggagaaaagcagtcc

SEQ ID NO: 12170 - RNA, 20 nt, synthetic construct
  source 1..20: mol_type = other RNA
cttaatttgatagaaggatc

SEQ ID NO: 12171 - RNA, 20 nt, synthetic construct
  source 1..20: mol_type = other RNA
ctgagccttaatttgataga

SEQ ID NO: 12172 - RNA, 20 nt, synthetic construct
  source 1..20: mol_type = other RNA
cagatccttctatcaaatta

SEQ ID NO: 12173 - RNA, 20 nt, synthetic construct
  source 1..20: mol_type = other RNA
aaagcatcatctccttagag

SEQ ID NO: 12174 - RNA, 20 nt, synthetic construct
  source 1..20: mol_type = other RNA
ggtcagagaaagcctctcta

SEQ ID NO: 12175 - RNA, 20 nt, synthetic construct
  source 1..20: mol_type = other RNA
ggtgggctgctttagctgag

SEQ ID NO: 12176 - RNA, 20 nt, synthetic construct
  source 1..20: mol_type = other RNA
tggtgggctgctttagctga

SEQ ID NO: 12177 - RNA, 20 nt, synthetic construct
  source 1..20: mol_type = other RNA
atggtgggctgctttagctg

SEQ ID NO: 12178 - RNA, 20 nt, synthetic construct
  source 1..20: mol_type = other RNA
aacggtaggatagagatggt

SEQ ID NO: 12179 - RNA, 20 nt, synthetic construct
  source 1..20: mol_type = other RNA
aaacggtaggatagagatgg

SEQ ID NO: 12180 - RNA, 20 nt, synthetic construct
  source 1..20: mol_type = other RNA
gtgaaacggtaggatagaga

SEQ ID NO: 12181 - RNA, 20 nt, synthetic construct
  source 1..20: mol_type = other RNA
tgaaacagaagtgaaacggt

SEQ ID NO: 12182 - RNA, 20 nt, synthetic construct
  source 1..20: mol_type = other RNA
ggagtgaaacagaagtgaaa

SEQ ID NO: 12183 - RNA, 20 nt, synthetic construct
  source 1..20: mol_type = other RNA
ggtctctgtaggtgtagaca

SEQ ID NO: 12184 - RNA, 20 nt, synthetic construct
  source 1..20: mol_type = other RNA
ctctagtagacggtctctgt

SEQ ID NO: 12185 - RNA, 20 nt, synthetic construct
  source 1..20: mol_type = other RNA
tgtgcctggcctctagtaga

SEQ ID NO: 12186 - RNA, 20 nt, synthetic construct
  source 1..20: mol_type = other RNA
ctacagagaccgtctactag

SEQ ID NO: 12187 - RNA, 20 nt, synthetic construct
  source 1..20: mol_type = other RNA
gagaccgtctactagaggcc

SEQ ID NO: 12188 - RNA, 20 nt, synthetic construct
  source 1..20: mol_type = other RNA
tcaacacttaaaactgtgcc

SEQ ID NO: 12189 - RNA, 20 nt, synthetic construct
  source 1..20: mol_type = other RNA
aggcacagttttaagtgttg

SEQ ID NO: 12190 - RNA, 20 nt, synthetic construct
  source 1..20: mol_type = other RNA
agttttaagtgttgaggaca

SEQ ID NO: 12191 - RNA, 20 nt, synthetic construct
  source 1..20: mol_type = other RNA
gacatggcagtgaacacaac

SEQ ID NO: 12192 - RNA, 20 nt, synthetic construct
  source 1..20: mol_type = other RNA
acatggcagtgaacacaaca

SEQ ID NO: 12193 - RNA, 20 nt, synthetic construct
  source 1..20: mol_type = other RNA
aactatgaaggcaggcaaga

SEQ ID NO: 12194 - RNA, 20 nt, synthetic construct
  source 1..20: mol_type = other RNA
tttttcggaactatgaaggc

SEQ ID NO: 12195 - RNA, 20 nt, synthetic construct
  source 1..20: mol_type = other RNA
agattttttcggaactatga

SEQ ID NO: 12196 - RNA, 20 nt, synthetic construct
  source 1..20: mol_type = other RNA
acaagagaatcagatttttt

SEQ ID NO: 12197 - RNA, 20 nt, synthetic construct
  source 1..20: mol_type = other RNA
aaaaatctgattctcttgtt

SEQ ID NO: 12198 - RNA, 20 nt, synthetic construct
  source 1..20: mol_type = other RNA
aaaatctgattctcttgttt

SEQ ID NO: 12199 - RNA, 20 nt, synthetic construct
  source 1..20: mol_type = other RNA
acttggtgaggaagactagt

SEQ ID NO: 12200 - RNA, 20 nt, synthetic construct
  source 1..20: mol_type = other RNA
tggccctttggcacttggtg

SEQ ID NO: 12201 - RNA, 20 nt, synthetic construct
  source 1..20: mol_type = other RNA
agccttggccctttggcact

SEQ ID NO: 12202 - RNA, 20 nt, synthetic construct
  source 1..20: mol_type = other RNA
tcttcctcaccaagtgccaa

SEQ ID NO: 12203 - RNA, 20 nt, synthetic construct
  source 1..20: mol_type = other RNA
cttcctcaccaagtgccaaa

SEQ ID NO: 12204 - RNA, 20 nt, synthetic construct
  source 1..20: mol_type = other RNA
cagaccaagccttggccctt

SEQ ID NO: 12205 - RNA, 20 nt, synthetic construct
  source 1..20: mol_type = other RNA
caccaagtgccaaagggcca

SEQ ID NO: 12206 - RNA, 20 nt, synthetic construct
  source 1..20: mol_type = other RNA
agtgccaaagggccaaggct

SEQ ID NO: 12207 - RNA, 20 nt, synthetic construct
  source 1..20: mol_type = other RNA
gaacaagacagaccaagcct

SEQ ID NO: 12208 - RNA, 20 nt, synthetic construct
  source 1..20: mol_type = other RNA
gttcactgtgttcaatcacc

SEQ ID NO: 12209 - RNA, 20 nt, synthetic construct
  source 1..20: mol_type = other RNA
tgttggttcagtacagtgcc

SEQ ID NO: 12210 - RNA, 20 nt, synthetic construct
  source 1..20: mol_type = other RNA
tttacagaatgaatgcttgt

SEQ ID NO: 12211 - RNA, 20 nt, synthetic construct
  source 1..20: mol_type = other RNA
gcattcattctgtaaaagaa

SEQ ID NO: 12212 - RNA, 20 nt, synthetic construct
  source 1..20: mol_type = other RNA
tcattctgtaaaagaacgga

SEQ ID NO: 12213 - RNA, 20 nt, synthetic construct
  source 1..20: mol_type = other RNA
tctgtaaaagaacggacgga

SEQ ID NO: 12214 - RNA, 20 nt, synthetic construct
  source 1..20: mol_type = other RNA
taaaagaacggacggatgga

SEQ ID NO: 12215 - RNA, 20 nt, synthetic construct
  source 1..20: mol_type = other RNA
agaacggacggatggatggc

SEQ ID NO: 12216 - RNA, 20 nt, synthetic construct
  source 1..20: mol_type = other RNA
cggacggatggatggcaggc

SEQ ID NO: 12217 - RNA, 20 nt, synthetic construct
  source 1..20: mol_type = other RNA
cggatggatggcaggcaggc

SEQ ID NO: 12218 - RNA, 20 nt, synthetic construct
  source 1..20: mol_type = other RNA
tggatggcaggcaggcaggc

SEQ ID NO: 12219 - RNA, 20 nt, synthetic construct
  source 1..20: mol_type = other RNA
tggcaggcaggcaggcaggc

SEQ ID NO: 12220 - RNA, 20 nt, synthetic construct
  source 1..20: mol_type = other RNA
ggcaggcaggcaggcaggct

SEQ ID NO: 12221 - RNA, 20 nt, synthetic construct
  source 1..20: mol_type = other RNA
gcaggcaggcaggcaggctg

SEQ ID NO: 12222 - RNA, 20 nt, synthetic construct
  source 1..20: mol_type = other RNA
ggcaggcaggcaggctgggg

SEQ ID NO: 12223 - RNA, 20 nt, synthetic construct
  source 1..20: mol_type = other RNA
ggggaggtgtgcagagcacc

SEQ ID NO: 12224 - RNA, 20 nt, synthetic construct
  source 1..20: mol_type = other RNA
tgccagggggagtgtgtgcc

SEQ ID NO: 12225 - RNA, 20 nt, synthetic construct
  source 1..20: mol_type = other RNA
cacctggcacacactccccc

SEQ ID NO: 12226 - RNA, 20 nt, synthetic construct
  source 1..20: mol_type = other RNA
agcgagaaccaagtgccagg

SEQ ID NO: 12227 - RNA, 20 nt, synthetic construct
  source 1..20: mol_type = other RNA
tagcgagaaccaagtgccag

SEQ ID NO: 12228 - RNA, 20 nt, synthetic construct
  source 1..20: mol_type = other RNA
ttagcgagaaccaagtgcca

SEQ ID NO: 12229 - RNA, 20 nt, synthetic construct
  source 1..20: mol_type = other RNA
cacacactccccctggcact

SEQ ID NO: 12230 - RNA, 20 nt, synthetic construct
  source 1..20: mol_type = other RNA
cttagcgagaaccaagtgcc

SEQ ID NO: 12231 - RNA, 20 nt, synthetic construct
  source 1..20: mol_type = other RNA
aatctcactgtgaacccatt

SEQ ID NO: 12232 - RNA, 20 nt, synthetic construct
  source 1..20: mol_type = other RNA
cggcagagggctctcctaat

SEQ ID NO: 12233 - RNA, 20 nt, synthetic construct
  source 1..20: mol_type = other RNA
gcggcagagggctctcctaa

SEQ ID NO: 12234 - RNA, 20 nt, synthetic construct
  source 1..20: mol_type = other RNA
acagcatagctggcggcaga

SEQ ID NO: 12235 - RNA, 20 nt, synthetic construct
  source 1..20: mol_type = other RNA
gacagcatagctggcggcag

SEQ ID NO: 12236 - RNA, 20 nt, synthetic construct
  source 1..20: mol_type = other RNA
cctactgacagcatagctgg

SEQ ID NO: 12237 - RNA, 20 nt, synthetic construct
  source 1..20: mol_type = other RNA
ggacctactgacagcatagc

SEQ ID NO: 12238 - RNA, 20 nt, synthetic construct
  source 1..20: mol_type = other RNA
ccgccagctatgctgtcagt

SEQ ID NO: 12239 - RNA, 20 nt, synthetic construct
  source 1..20: mol_type = other RNA
atggtggtacagggtggggt

SEQ ID NO: 12240 - RNA, 20 nt, synthetic construct
  source 1..20: mol_type = other RNA
gcagatggtggtacagggtg

SEQ ID NO: 12241 - RNA, 20 nt, synthetic construct
  source 1..20: mol_type = other RNA
tgcagatggtggtacagggt

SEQ ID NO: 12242 - RNA, 20 nt, synthetic construct
  source 1..20: mol_type = other RNA
ttgcagatggtggtacaggg

SEQ ID NO: 12243 - RNA, 20 nt, synthetic construct
  source 1..20: mol_type = other RNA
ctgttgcagatggtggtaca

SEQ ID NO: 12244 - RNA, 20 nt, synthetic construct
  source 1..20: mol_type = other RNA
tctgttgcagatggtggtac

SEQ ID NO: 12245 - RNA, 20 nt, synthetic construct
  source 1..20: mol_type = other RNA
attgagtctgttgcagatgg

SEQ ID NO: 12246 - RNA, 20 nt, synthetic construct
  source 1..20: mol_type = other RNA
aacattgagtctgttgcaga

SEQ ID NO: 12247 - RNA, 20 nt, synthetic construct
  source 1..20: mol_type = other RNA
gtttcaacatatgaagtttg

SEQ ID NO: 12248 - RNA, 20 nt, synthetic construct
  source 1..20: mol_type = other RNA
gaaactctgatcccaaatga

SEQ ID NO: 12249 - RNA, 20 nt, synthetic construct
  source 1..20: mol_type = other RNA
accccgcaataccatcattt

SEQ ID NO: 12250 - RNA, 20 nt, synthetic construct
  source 1..20: mol_type = other RNA
caccccgcaataccatcatt

SEQ ID NO: 12251 - RNA, 20 nt, synthetic construct
  source 1..20: mol_type = other RNA
gatcccaaatgatggtattg

SEQ ID NO: 12252 - RNA, 20 nt, synthetic construct
  source 1..20: mol_type = other RNA
atcccaaatgatggtattgc

SEQ ID NO: 12253 - RNA, 20 nt, synthetic construct
  source 1..20: mol_type = other RNA
tcccaaatgatggtattgcg

SEQ ID NO: 12254 - RNA, 20 nt, synthetic construct
  source 1..20: mol_type = other RNA
aatgatggtattgcggggtg

SEQ ID NO: 12255 - RNA, 20 nt, synthetic construct
  source 1..20: mol_type = other RNA
gtattgcggggtgcggcctt

SEQ ID NO: 12256 - RNA, 20 nt, synthetic construct
  source 1..20: mol_type = other RNA
tattgcggggtgcggcctta

SEQ ID NO: 12257 - RNA, 20 nt, synthetic construct
  source 1..20: mol_type = other RNA
tgcggggtgcggccttaggg

SEQ ID NO: 12258 - RNA, 20 nt, synthetic construct
  source 1..20: mol_type = other RNA
gtgacctaatcacctcccta

SEQ ID NO: 12259 - RNA, 20 nt, synthetic construct
  source 1..20: mol_type = other RNA
gcggccttagggaggtgatt

SEQ ID NO: 12260 - RNA, 20 nt, synthetic construct
  source 1..20: mol_type = other RNA
gggaggtgattaggtcacga

SEQ ID NO: 12261 - RNA, 20 nt, synthetic construct
  source 1..20: mol_type = other RNA
tcacgaaggcagagccttca

SEQ ID NO: 12262 - RNA, 20 nt, synthetic construct
  source 1..20: mol_type = other RNA
cacgaaggcagagccttcat

SEQ ID NO: 12263 - RNA, 20 nt, synthetic construct
  source 1..20: mol_type = other RNA
ggcattaatcccacccatga

SEQ ID NO: 12264 - RNA, 20 nt, synthetic construct
  source 1..20: mol_type = other RNA
gaaggcagagccttcatggg

SEQ ID NO: 12265 - RNA, 20 nt, synthetic construct
  source 1..20: mol_type = other RNA
aaggcagagccttcatgggt

SEQ ID NO: 12266 - RNA, 20 nt, synthetic construct
  source 1..20: mol_type = other RNA
atctcttactgttcttataa

SEQ ID NO: 12267 - RNA, 20 nt, synthetic construct
  source 1..20: mol_type = other RNA
tatctcttactgttcttata

SEQ ID NO: 12268 - RNA, 20 nt, synthetic construct
  source 1..20: mol_type = other RNA
aacagaacaccataggctgg

SEQ ID NO: 12269 - RNA, 20 nt, synthetic construct
  source 1..20: mol_type = other RNA
taacagaacaccataggctg

SEQ ID NO: 12270 - RNA, 20 nt, synthetic construct
  source 1..20: mol_type = other RNA
tgtttaagtcccccagccta

SEQ ID NO: 12271 - RNA, 20 nt, synthetic construct
  source 1..20: mol_type = other RNA
ataacagaacaccataggct

SEQ ID NO: 12272 - RNA, 20 nt, synthetic construct
  source 1..20: mol_type = other RNA
tataacagaacaccataggc

SEQ ID NO: 12273 - RNA, 20 nt, synthetic construct
  source 1..20: mol_type = other RNA
ctgctataacagaacaccat

SEQ ID NO: 12274 - RNA, 20 nt, synthetic construct
  source 1..20: mol_type = other RNA
ccaagacaaccacaggcaga

SEQ ID NO: 12275 - RNA, 20 nt, synthetic construct
  source 1..20: mol_type = other RNA
gccaagacaaccacaggcag

SEQ ID NO: 12276 - RNA, 20 nt, synthetic construct
  source 1..20: mol_type = other RNA
actaagacaccctctgcctg

SEQ ID NO: 12277 - RNA, 20 nt, synthetic construct
  source 1..20: mol_type = other RNA
ggctttgccaagacaaccac

SEQ ID NO: 12278 - RNA, 20 nt, synthetic construct
  source 1..20: mol_type = other RNA
ccctctgcctgtggttgtct

SEQ ID NO: 12279 - RNA, 20 nt, synthetic construct
  source 1..20: mol_type = other RNA
gtggttgtcttggcaaagcc

SEQ ID NO: 12280 - RNA, 20 nt, synthetic construct
  source 1..20: mol_type = other RNA
cacccctctcctgcattacc

SEQ ID NO: 12281 - RNA, 20 nt, synthetic construct
  source 1..20: mol_type = other RNA
ttggcaaagccaggtaatgc

SEQ ID NO: 12282 - RNA, 20 nt, synthetic construct
  source 1..20: mol_type = other RNA
aaagccaggtaatgcaggag

SEQ ID NO: 12283 - RNA, 20 nt, synthetic construct
  source 1..20: mol_type = other RNA
aagccaggtaatgcaggaga

SEQ ID NO: 12284 - RNA, 20 nt, synthetic construct
  source 1..20: mol_type = other RNA
agccaggtaatgcaggagag

SEQ ID NO: 12285 - RNA, 20 nt, synthetic construct
  source 1..20: mol_type = other RNA
caggtaatgcaggagagggg

SEQ ID NO: 12286 - RNA, 20 nt, synthetic construct
  source 1..20: mol_type = other RNA
gggtggactcagcctgcttg

SEQ ID NO: 12287 - RNA, 20 nt, synthetic construct
  source 1..20: mol_type = other RNA
taatgccattcaccgcaagc

SEQ ID NO: 12288 - RNA, 20 nt, synthetic construct
  source 1..20: mol_type = other RNA
ctcagcctgcttgcggtgaa

SEQ ID NO: 12289 - RNA, 20 nt, synthetic construct
  source 1..20: mol_type = other RNA
caagggctcctttaggaaaa

SEQ ID NO: 12290 - RNA, 20 nt, synthetic construct
  source 1..20: mol_type = other RNA
attagtgtccattttcctaa

SEQ ID NO: 12291 - RNA, 20 nt, synthetic construct
  source 1..20: mol_type = other RNA
tggtgggcaagggctccttt

SEQ ID NO: 12292 - RNA, 20 nt, synthetic construct
  source 1..20: mol_type = other RNA
tgctgagatatggtgggcaa

SEQ ID NO: 12293 - RNA, 20 nt, synthetic construct
  source 1..20: mol_type = other RNA
atgctgagatatggtgggca

SEQ ID NO: 12294 - RNA, 20 nt, synthetic construct
  source 1..20: mol_type = other RNA
aggggatgctgagatatggt

SEQ ID NO: 12295 - RNA, 20 nt, synthetic construct
  source 1..20: mol_type = other RNA
gaggggatgctgagatatgg

SEQ ID NO: 12296 - RNA, 20 nt, synthetic construct
  source 1..20: mol_type = other RNA
gaagaggggatgctgagata

SEQ ID NO: 12297 - RNA, 20 nt, synthetic construct
  source 1..20: mol_type = other RNA
gtctaagtggcaatgaagag

SEQ ID NO: 12298 - RNA, 20 nt, synthetic construct
  source 1..20: mol_type = other RNA
ggtctaagtggcaatgaaga

SEQ ID NO: 12299 - RNA, 20 nt, synthetic construct
  source 1..20: mol_type = other RNA
gggtctaagtggcaatgaag

SEQ ID NO: 12300 - RNA, 20 nt, synthetic construct
  source 1..20: mol_type = other RNA
cactgggcacagggtctaag

SEQ ID NO: 12301 - RNA, 20 nt, synthetic construct
  source 1..20: mol_type = other RNA
ctggagtgtcactgggcaca

SEQ ID NO: 12302 - RNA, 20 nt, synthetic construct
  source 1..20: mol_type = other RNA
actggagtgtcactgggcac

SEQ ID NO: 12303 - RNA, 20 nt, synthetic construct
  source 1..20: mol_type = other RNA
gacagtactggagtgtcact

SEQ ID NO: 12304 - RNA, 20 nt, synthetic construct
  source 1..20: mol_type = other RNA
ggacagtactggagtgtcac

SEQ ID NO: 12305 - RNA, 20 nt, synthetic construct
  source 1..20: mol_type = other RNA
cccctgagactggacagtac

SEQ ID NO: 12306 - RNA, 20 nt, synthetic construct
  source 1..20: mol_type = other RNA
ctccagtactgtccagtctc

SEQ ID NO: 12307 - RNA, 20 nt, synthetic construct
  source 1..20: mol_type = other RNA
tccagtactgtccagtctca

SEQ ID NO: 12308 - RNA, 20 nt, synthetic construct
  source 1..20: mol_type = other RNA
cttggctcagcccctgagac

SEQ ID NO: 12309 - RNA, 20 nt, synthetic construct
  source 1..20: mol_type = other RNA
ccagtactgtccagtctcag

SEQ ID NO: 12310 - RNA, 20 nt, synthetic construct
  source 1..20: mol_type = other RNA
cagtctcaggggctgagcca

SEQ ID NO: 12311 - RNA, 20 nt, synthetic construct
  source 1..20: mol_type = other RNA
cagggcaggcaggaacgcct

SEQ ID NO: 12312 - RNA, 20 nt, synthetic construct
  source 1..20: mol_type = other RNA
gtgagggtcacagggcaggc

SEQ ID NO: 12313 - RNA, 20 nt, synthetic construct
  source 1..20: mol_type = other RNA
tctggtgagggtcacagggc

SEQ ID NO: 12314 - RNA, 20 nt, synthetic construct
  source 1..20: mol_type = other RNA
caggtctggtgagggtcaca

SEQ ID NO: 12315 - RNA, 20 nt, synthetic construct
  source 1..20: mol_type = other RNA
ccaggtctggtgagggtcac

SEQ ID NO: 12316 - RNA, 20 nt, synthetic construct
  source 1..20: mol_type = other RNA
gcagctgccaggtctggtga

SEQ ID NO: 12317 - RNA, 20 nt, synthetic construct
  source 1..20: mol_type = other RNA
ggcagctgccaggtctggtg

SEQ ID NO: 12318 - RNA, 20 nt, synthetic construct
  source 1..20: mol_type = other RNA
cctgtgaccctcaccagacc

SEQ ID NO: 12319 - RNA, 20 nt, synthetic construct
  source 1..20: mol_type = other RNA
tgtcaggcagctgccaggtc

SEQ ID NO: 12320 - RNA, 20 nt, synthetic construct
  source 1..20: mol_type = other RNA
caagctgtcaggcagctgcc

SEQ ID NO: 12321 - RNA, 20 nt, synthetic construct
  source 1..20: mol_type = other RNA
cgtgagccagacaagctgtc

SEQ ID NO: 12322 - RNA, 20 nt, synthetic construct
  source 1..20: mol_type = other RNA
cagctgcctgacagcttgtc

SEQ ID NO: 12323 - RNA, 20 nt, synthetic construct
  source 1..20: mol_type = other RNA
gtcatagtcacaaggaagag

SEQ ID NO: 12324 - RNA, 20 nt, synthetic construct
  source 1..20: mol_type = other RNA
aagacttggtcatagtcaca

SEQ ID NO: 12325 - RNA, 20 nt, synthetic construct
  source 1..20: mol_type = other RNA
gtccaggaaggagtaagact

SEQ ID NO: 12326 - RNA, 20 nt, synthetic construct
  source 1..20: mol_type = other RNA
gaccaagtcttactccttcc

SEQ ID NO: 12327 - RNA, 20 nt, synthetic construct
  source 1..20: mol_type = other RNA
agggaaatgaaggtccagga

SEQ ID NO: 12328 - RNA, 20 nt, synthetic construct
  source 1..20: mol_type = other RNA
aggtagggaaatgaaggtcc

SEQ ID NO: 12329 - RNA, 20 nt, synthetic construct
  source 1..20: mol_type = other RNA
tgtgagaggtagggaaatga

SEQ ID NO: 12330 - RNA, 20 nt, synthetic construct
  source 1..20: mol_type = other RNA
cactgtgtatgtgagaggta

SEQ ID NO: 12331 - RNA, 20 nt, synthetic construct
  source 1..20: mol_type = other RNA
ccactgtgtatgtgagaggt

SEQ ID NO: 12332 - RNA, 20 nt, synthetic construct
  source 1..20: mol_type = other RNA
cagcccactgtgtatgtgag

SEQ ID NO: 12333 - RNA, 20 nt, synthetic construct
  source 1..20: mol_type = other RNA
cctacctctcacatacacag

SEQ ID NO: 12334 - RNA, 20 nt, synthetic construct
  source 1..20: mol_type = other RNA
ctacctctcacatacacagt

SEQ ID NO: 12335 - RNA, 20 nt, synthetic construct
  source 1..20: mol_type = other RNA
ctctcacatacacagtgggc

SEQ ID NO: 12336 - RNA, 20 nt, synthetic construct
  source 1..20: mol_type = other RNA
atacacagtgggctggatgc

SEQ ID NO: 12337 - RNA, 20 nt, synthetic construct
  source 1..20: mol_type = other RNA
tgtctttggggctgtgacga

SEQ ID NO: 12338 - RNA, 20 nt, synthetic construct
  source 1..20: mol_type = other RNA
ctgtctttggggctgtgacg

SEQ ID NO: 12339 - RNA, 20 nt, synthetic construct
  source 1..20: mol_type = other RNA
atggtcaagtcctgtctttg

SEQ ID NO: 12340 - RNA, 20 nt, synthetic construct
  source 1..20: mol_type = other RNA
ctcgtcacagccccaaagac

SEQ ID NO: 12341 - RNA, 20 nt, synthetic construct
  source 1..20: mol_type = other RNA
gatggtcaagtcctgtcttt

SEQ ID NO: 12342 - RNA, 20 nt, synthetic construct
  source 1..20: mol_type = other RNA
agatggtcaagtcctgtctt

SEQ ID NO: 12343 - RNA, 20 nt, synthetic construct
  source 1..20: mol_type = other RNA
acagggtcattgcactgaga

SEQ ID NO: 12344 - RNA, 20 nt, synthetic construct
  source 1..20: mol_type = other RNA
atctcagtgcaatgaccctg

SEQ ID NO: 12345 - RNA, 20 nt, synthetic construct
  source 1..20: mol_type = other RNA
cctcgggagaaggcaccaca

SEQ ID NO: 12346 - RNA, 20 nt, synthetic construct
  source 1..20: mol_type = other RNA
tcctcgggagaaggcaccac

SEQ ID NO: 12347 - RNA, 20 nt, synthetic construct
  source 1..20: mol_type = other RNA
gctcttaggtcctcgggaga

SEQ ID NO: 12348 - RNA, 20 nt, synthetic construct
  source 1..20: mol_type = other RNA
ccctgtggtgccttctcccg

SEQ ID NO: 12349 - RNA, 20 nt, synthetic construct
  source 1..20: mol_type = other RNA
cagggggctcttaggtcctc

SEQ ID NO: 12350 - RNA, 20 nt, synthetic construct
  source 1..20: mol_type = other RNA
tcagggggctcttaggtcct

SEQ ID NO: 12351 - RNA, 20 nt, synthetic construct
  source 1..20: mol_type = other RNA
caagcgctcagggggctctt

SEQ ID NO: 12352 - RNA, 20 nt, synthetic construct
  source 1..20: mol_type = other RNA
agtgtttgcaagcgctcagg

SEQ ID NO: 12353 - RNA, 20 nt, synthetic construct
  source 1..20: mol_type = other RNA
cagtgtttgcaagcgctcag

SEQ ID NO: 12354 - RNA, 20 nt, synthetic construct
  source 1..20: mol_type = other RNA
gcagtgtttgcaagcgctca

SEQ ID NO: 12355 - RNA, 20 nt, synthetic construct
  source 1..20: mol_type = other RNA
tgcagtgtttgcaagcgctc

SEQ ID NO: 12356 - RNA, 20 nt, synthetic construct
  source 1..20: mol_type = other RNA
actgcagacaaagcgagccc

SEQ ID NO: 12357 - RNA, 20 nt, synthetic construct
  source 1..20: mol_type = other RNA
cttcacagaacaggcaggca

SEQ ID NO: 12358 - RNA, 20 nt, synthetic construct
  source 1..20: mol_type = other RNA
ccttcacagaacaggcaggc

SEQ ID NO: 12359 - RNA, 20 nt, synthetic construct
  source 1..20: mol_type = other RNA
gctcccttcacagaacaggc

SEQ ID NO: 12360 - RNA, 20 nt, synthetic construct
  source 1..20: mol_type = other RNA
gtaggctcccttcacagaac

SEQ ID NO: 12361 - RNA, 20 nt, synthetic construct
  source 1..20: mol_type = other RNA
cctgcctgcctgttctgtga

SEQ ID NO: 12362 - RNA, 20 nt, synthetic construct
  source 1..20: mol_type = other RNA
ctgcctgcctgttctgtgaa

SEQ ID NO: 12363 - RNA, 20 nt, synthetic construct
  source 1..20: mol_type = other RNA
gcaggggctgccagttttgt

SEQ ID NO: 12364 - RNA, 20 nt, synthetic construct
  source 1..20: mol_type = other RNA
gtgaagggagcctacaaaac

SEQ ID NO: 12365 - RNA, 20 nt, synthetic construct
  source 1..20: mol_type = other RNA
tctgcagctcagaactgcag

SEQ ID NO: 12366 - RNA, 20 nt, synthetic construct
  source 1..20: mol_type = other RNA
ttctgcagctcagaactgca

SEQ ID NO: 12367 - RNA, 20 nt, synthetic construct
  source 1..20: mol_type = other RNA
gttctgcagctcagaactgc

SEQ ID NO: 12368 - RNA, 20 nt, synthetic construct
  source 1..20: mol_type = other RNA
gagctgcagaactgatgagc

SEQ ID NO: 12369 - RNA, 20 nt, synthetic construct
  source 1..20: mol_type = other RNA
agctgcagaactgatgagct

SEQ ID NO: 12370 - RNA, 20 nt, synthetic construct
  source 1..20: mol_type = other RNA
gctgcagaactgatgagctg

SEQ ID NO: 12371 - RNA, 20 nt, synthetic construct
  source 1..20: mol_type = other RNA
tattttggagtcaggtttca

SEQ ID NO: 12372 - RNA, 20 nt, synthetic construct
  source 1..20: mol_type = other RNA
ctattttggagtcaggtttc

SEQ ID NO: 12373 - RNA, 20 nt, synthetic construct
  source 1..20: mol_type = other RNA
tttgctgctattttggagtc

SEQ ID NO: 12374 - RNA, 20 nt, synthetic construct
  source 1..20: mol_type = other RNA
ccttgggtttgctgctattt

SEQ ID NO: 12375 - RNA, 20 nt, synthetic construct
  source 1..20: mol_type = other RNA
ccaaaatagcagcaaaccca

SEQ ID NO: 12376 - RNA, 20 nt, synthetic construct
  source 1..20: mol_type = other RNA
ccgtacttccttttggcctt

SEQ ID NO: 12377 - RNA, 20 nt, synthetic construct
  source 1..20: mol_type = other RNA
cccgtacttccttttggcct

SEQ ID NO: 12378 - RNA, 20 nt, synthetic construct
  source 1..20: mol_type = other RNA
gcagcaaacccaaggccaaa

SEQ ID NO: 12379 - RNA, 20 nt, synthetic construct
  source 1..20: mol_type = other RNA
aagaagcccgtacttccttt

SEQ ID NO: 12380 - RNA, 20 nt, synthetic construct
  source 1..20: mol_type = other RNA
cccaaggccaaaaggaagta

SEQ ID NO: 12381 - RNA, 20 nt, synthetic construct
  source 1..20: mol_type = other RNA
ccaaggccaaaaggaagtac

SEQ ID NO: 12382 - RNA, 20 nt, synthetic construct
  source 1..20: mol_type = other RNA
ctctaggccaaagctgtgag

SEQ ID NO: 12383 - RNA, 20 nt, synthetic construct
  source 1..20: mol_type = other RNA
gatttctcctctcacagctt

SEQ ID NO: 12384 - RNA, 20 nt, synthetic construct
  source 1..20: mol_type = other RNA
ggattaagtgcaggggctct

SEQ ID NO: 12385 - RNA, 20 nt, synthetic construct
  source 1..20: mol_type = other RNA
tgggtggggattaagtgcag

SEQ ID NO: 12386 - RNA, 20 nt, synthetic construct
  source 1..20: mol_type = other RNA
ctgggtggggattaagtgca

SEQ ID NO: 12387 - RNA, 20 nt, synthetic construct
  source 1..20: mol_type = other RNA
gctgggtggggattaagtgc

SEQ ID NO: 12388 - RNA, 20 nt, synthetic construct
  source 1..20: mol_type = other RNA
gcccttggggtagctgggtg

SEQ ID NO: 12389 - RNA, 20 nt, synthetic construct
  source 1..20: mol_type = other RNA
ggcccttggggtagctgggt

SEQ ID NO: 12390 - RNA, 20 nt, synthetic construct
  source 1..20: mol_type = other RNA
tggcccttggggtagctggg

SEQ ID NO: 12391 - RNA, 20 nt, synthetic construct
  source 1..20: mol_type = other RNA
ctgtggcccttggggtagct

SEQ ID NO: 12392 - RNA, 20 nt, synthetic construct
  source 1..20: mol_type = other RNA
actgtggcccttggggtagc

SEQ ID NO: 12393 - RNA, 20 nt, synthetic construct
  source 1..20: mol_type = other RNA
atccccacccagctacccca

SEQ ID NO: 12394 - RNA, 20 nt, synthetic construct
  source 1..20: mol_type = other RNA
tccccacccagctaccccaa

SEQ ID NO: 12395 - RNA, 20 nt, synthetic construct
  source 1..20: mol_type = other RNA
cctttgtactgtggcccttg

SEQ ID NO: 12396 - RNA, 20 nt, synthetic construct
  source 1..20: mol_type = other RNA
acctttgtactgtggccctt

SEQ ID NO: 12397 - RNA, 20 nt, synthetic construct
  source 1..20: mol_type = other RNA
cacctttgtactgtggccct

SEQ ID NO: 12398 - RNA, 20 nt, synthetic construct
  source 1..20: mol_type = other RNA
cacgaatcacctttgtactg

SEQ ID NO: 12399 - RNA, 20 nt, synthetic construct
  source 1..20: mol_type = other RNA
ccccaagggccacagtacaa

SEQ ID NO: 12400 - RNA, 20 nt, synthetic construct
  source 1..20: mol_type = other RNA
gtacaaaggtgattcgtgcc

SEQ ID NO: 12401 - RNA, 20 nt, synthetic construct
  source 1..20: mol_type = other RNA
gtcagaagacacagggagcc

SEQ ID NO: 12402 - RNA, 20 nt, synthetic construct
  source 1..20: mol_type = other RNA
taggggtgtcagaagacaca

SEQ ID NO: 12403 - RNA, 20 nt, synthetic construct
  source 1..20: mol_type = other RNA
ttaggggtgtcagaagacac

SEQ ID NO: 12404 - RNA, 20 nt, synthetic construct
  source 1..20: mol_type = other RNA
ctagaaggataaagatttag

SEQ ID NO: 12405 - RNA, 20 nt, synthetic construct
  source 1..20: mol_type = other RNA
cctagaaggataaagattta

SEQ ID NO: 12406 - RNA, 20 nt, synthetic construct
  source 1..20: mol_type = other RNA
tcctagaaggataaagattt

SEQ ID NO: 12407 - RNA, 20 nt, synthetic construct
  source 1..20: mol_type = other RNA
ccctaaatctttatccttct

SEQ ID NO: 12408 - RNA, 20 nt, synthetic construct
  source 1..20: mol_type = other RNA
ggattctcgcttgtcctaga

SEQ ID NO: 12409 - RNA, 20 nt, synthetic construct
  source 1..20: mol_type = other RNA
atgatgaccttggcttttgg

SEQ ID NO: 12410 - RNA, 20 nt, synthetic construct
  source 1..20: mol_type = other RNA
gatgatgaccttggcttttg

SEQ ID NO: 12411 - RNA, 20 nt, synthetic construct
  source 1..20: mol_type = other RNA
tgatgatgaccttggctttt

SEQ ID NO: 12412 - RNA, 20 nt, synthetic construct
  source 1..20: mol_type = other RNA
ttgatgatgaccttggcttt

SEQ ID NO: 12413 - RNA, 20 nt, synthetic construct
  source 1..20: mol_type = other RNA
cgagaatcccccaaaagcca

SEQ ID NO: 12414 - RNA, 20 nt, synthetic construct
  source 1..20: mol_type = other RNA
tcctggcttgatgatgacct

SEQ ID NO: 12415 - RNA, 20 nt, synthetic construct
  source 1..20: mol_type = other RNA
gccaaggtcatcatcaagcc

SEQ ID NO: 12416 - RNA, 20 nt, synthetic construct
  source 1..20: mol_type = other RNA
gtcatcatcaagccaggatg

SEQ ID NO: 12417 - RNA, 20 nt, synthetic construct
  source 1..20: mol_type = other RNA
tcctcctccagtcctcatcc

SEQ ID NO: 12418 - RNA, 20 nt, synthetic construct
  source 1..20: mol_type = other RNA
catcaagccaggatgaggac

SEQ ID NO: 12419 - RNA, 20 nt, synthetic construct
  source 1..20: mol_type = other RNA
caagccaggatgaggactgg

SEQ ID NO: 12420 - RNA, 20 nt, synthetic construct
  source 1..20: mol_type = other RNA
gccaggatgaggactggagg

SEQ ID NO: 12421 - RNA, 20 nt, synthetic construct
  source 1..20: mol_type = other RNA
gctgacagctctgcctcaaa

SEQ ID NO: 12422 - RNA, 20 nt, synthetic construct
  source 1..20: mol_type = other RNA
ttcgctcccaaatccatttg

SEQ ID NO: 12423 - RNA, 20 nt, synthetic construct
  source 1..20: mol_type = other RNA
agctctgcctcaaatggatt

SEQ ID NO: 12424 - RNA, 20 nt, synthetic construct
  source 1..20: mol_type = other RNA
gctctgcctcaaatggattt

SEQ ID NO: 12425 - RNA, 20 nt, synthetic construct
  source 1..20: mol_type = other RNA
tcaaatggatttgggagcga

SEQ ID NO: 12426 - RNA, 20 nt, synthetic construct
  source 1..20: mol_type = other RNA
tgacttacccccaaagctta

SEQ ID NO: 12427 - RNA, 20 nt, synthetic construct
  source 1..20: mol_type = other RNA
aaggctttttccataagctt

SEQ ID NO: 12428 - RNA, 20 nt, synthetic construct
  source 1..20: mol_type = other RNA
aggctttttccataagcttt

SEQ ID NO: 12429 - RNA, 20 nt, synthetic construct
  source 1..20: mol_type = other RNA
ggctttttccataagctttg

SEQ ID NO: 12430 - RNA, 20 nt, synthetic construct
  source 1..20: mol_type = other RNA
gctttttccataagctttgg

SEQ ID NO: 12431 - RNA, 20 nt, synthetic construct
  source 1..20: mol_type = other RNA
ccgagactaagttacatttg

SEQ ID NO: 12432 - RNA, 20 nt, synthetic construct
  source 1..20: mol_type = other RNA
cccgagactaagttacattt

SEQ ID NO: 12433 - RNA, 20 nt, synthetic construct
  source 1..20: mol_type = other RNA
ccccgagactaagttacatt

SEQ ID NO: 12434 - RNA, 20 nt, synthetic construct
  source 1..20: mol_type = other RNA
ccccaaatgtaacttagtct

SEQ ID NO: 12435 - RNA, 20 nt, synthetic construct
  source 1..20: mol_type = other RNA
cccaaatgtaacttagtctc

SEQ ID NO: 12436 - RNA, 20 nt, synthetic construct
  source 1..20: mol_type = other RNA
ccaaatgtaacttagtctcg

SEQ ID NO: 12437 - RNA, 20 nt, synthetic construct
  source 1..20: mol_type = other RNA
gggacagctggtgaaaagga

SEQ ID NO: 12438 - RNA, 20 nt, synthetic construct
  source 1..20: mol_type = other RNA
aaaggggacagctggtgaaa

SEQ ID NO: 12439 - RNA, 20 nt, synthetic construct
  source 1..20: mol_type = other RNA
cctccagcaaaggggacagc

SEQ ID NO: 12440 - RNA, 20 nt, synthetic construct
  source 1..20: mol_type = other RNA
tcaccagctgtcccctttgc

SEQ ID NO: 12441 - RNA, 20 nt, synthetic construct
  source 1..20: mol_type = other RNA
gaaagcttcctccagcaaag

SEQ ID NO: 12442 - RNA, 20 nt, synthetic construct
  source 1..20: mol_type = other RNA
ggaaagcttcctccagcaaa

SEQ ID NO: 12443 - RNA, 20 nt, synthetic construct
  source 1..20: mol_type = other RNA
tggaaagcttcctccagcaa

SEQ ID NO: 12444 - RNA, 20 nt, synthetic construct
  source 1..20: mol_type = other RNA
ccagctgtcccctttgctgg

SEQ ID NO: 12445 - RNA, 20 nt, synthetic construct
  source 1..20: mol_type = other RNA
cttaagcccttcgtttgggc

SEQ ID NO: 12446 - RNA, 20 nt, synthetic construct
  source 1..20: mol_type = other RNA
aagctttccagcccaaacga

SEQ ID NO: 12447 - RNA, 20 nt, synthetic construct
  source 1..20: mol_type = other RNA
tcctcttaagcccttcgttt

SEQ ID NO: 12448 - RNA, 20 nt, synthetic construct
  source 1..20: mol_type = other RNA
agctttccagcccaaacgaa

SEQ ID NO: 12449 - RNA, 20 nt, synthetic construct
  source 1..20: mol_type = other RNA
ctcctcttaagcccttcgtt

SEQ ID NO: 12450 - RNA, 20 nt, synthetic construct
  source 1..20: mol_type = other RNA
gcccaaacgaagggcttaag

SEQ ID NO: 12451 - RNA, 20 nt, synthetic construct
  source 1..20: mol_type = other RNA
cgaagggcttaagaggagtc

SEQ ID NO: 12452 - RNA, 20 nt, synthetic construct
  source 1..20: mol_type = other RNA
aagaggagtctggccattcc

SEQ ID NO: 12453 - RNA, 20 nt, synthetic construct
  source 1..20: mol_type = other RNA
gtctaactggatgccaggaa

SEQ ID NO: 12454 - RNA, 20 nt, synthetic construct
  source 1..20: mol_type = other RNA
tccaggtctaactggatgcc

SEQ ID NO: 12455 - RNA, 20 nt, synthetic construct
  source 1..20: mol_type = other RNA
tcacctcctccaggtctaac

SEQ ID NO: 12456 - RNA, 20 nt, synthetic construct
  source 1..20: mol_type = other RNA
tcctggcatccagttagacc

SEQ ID NO: 12457 - RNA, 20 nt, synthetic construct
  source 1..20: mol_type = other RNA
tggcatccagttagacctgg

SEQ ID NO: 12458 - RNA, 20 nt, synthetic construct
  source 1..20: mol_type = other RNA
catccagttagacctggagg

SEQ ID NO: 12459 - RNA, 20 nt, synthetic construct
  source 1..20: mol_type = other RNA
ctcctccgttcacctcctcc

SEQ ID NO: 12460 - RNA, 20 nt, synthetic construct
  source 1..20: mol_type = other RNA
ttagacctggaggaggtgaa

SEQ ID NO: 12461 - RNA, 20 nt, synthetic construct
  source 1..20: mol_type = other RNA
gacctggaggaggtgaacgg

SEQ ID NO: 12462 - RNA, 20 nt, synthetic construct
  source 1..20: mol_type = other RNA
gtgaacggaggagaagcctg

SEQ ID NO: 12463 - RNA, 20 nt, synthetic construct
  source 1..20: mol_type = other RNA
tgaacggaggagaagcctga

SEQ ID NO: 12464 - RNA, 20 nt, synthetic construct
  source 1..20: mol_type = other RNA
acggaggagaagcctgaggg

SEQ ID NO: 12465 - RNA, 20 nt, synthetic construct
  source 1..20: mol_type = other RNA
cggaggagaagcctgaggga

SEQ ID NO: 12466 - RNA, 20 nt, synthetic construct
  source 1..20: mol_type = other RNA
cggatacacacccctccctc

SEQ ID NO: 12467 - RNA, 20 nt, synthetic construct
  source 1..20: mol_type = other RNA
ggaggagaagcctgagggag

SEQ ID NO: 12468 - RNA, 20 nt, synthetic construct
  source 1..20: mol_type = other RNA
ctgagggaggggtgtgtatc

SEQ ID NO: 12469 - RNA, 20 nt, synthetic construct
  source 1..20: mol_type = other RNA
ggaggggtgtgtatccggcc

SEQ ID NO: 12470 - RNA, 20 nt, synthetic construct
  source 1..20: mol_type = other RNA
gaggggtgtgtatccggcct

SEQ ID NO: 12471 - RNA, 20 nt, synthetic construct
  source 1..20: mol_type = other RNA
agagggaggaattcccaggc

SEQ ID NO: 12472 - RNA, 20 nt, synthetic construct
  source 1..20: mol_type = other RNA
agggagagggaggaattccc

SEQ ID NO: 12473 - RNA, 20 nt, synthetic construct
  source 1..20: mol_type = other RNA
ggcgctagcaagggagaggg

SEQ ID NO: 12474 - RNA, 20 nt, synthetic construct
  source 1..20: mol_type = other RNA
tggggcgctagcaagggaga

SEQ ID NO: 12475 - RNA, 20 nt, synthetic construct
  source 1..20: mol_type = other RNA
ttggggcgctagcaagggag

SEQ ID NO: 12476 - RNA, 20 nt, synthetic construct
  source 1..20: mol_type = other RNA
gcgggttggggcgctagcaa

SEQ ID NO: 12477 - RNA, 20 nt, synthetic construct
  source 1..20: mol_type = other RNA
ggcgggttggggcgctagca

SEQ ID NO: 12478 - RNA, 20 nt, synthetic construct
  source 1..20: mol_type = other RNA
aacaggatgagggcgggttg

SEQ ID NO: 12479 - RNA, 20 nt, synthetic construct
  source 1..20: mol_type = other RNA
gaacaggatgagggcgggtt

SEQ ID NO: 12480 - RNA, 20 nt, synthetic construct
  source 1..20: mol_type = other RNA
tgaacaggatgagggcgggt

SEQ ID NO: 12481 - RNA, 20 nt, synthetic construct
  source 1..20: mol_type = other RNA
tctctgaacaggatgagggc

SEQ ID NO: 12482 - RNA, 20 nt, synthetic construct
  source 1..20: mol_type = other RNA
ctctctgaacaggatgaggg

SEQ ID NO: 12483 - RNA, 20 nt, synthetic construct
  source 1..20: mol_type = other RNA
gccctctctgaacaggatga

SEQ ID NO: 12484 - RNA, 20 nt, synthetic construct
  source 1..20: mol_type = other RNA
tgccctctctgaacaggatg

SEQ ID NO: 12485 - RNA, 20 nt, synthetic construct
  source 1..20: mol_type = other RNA
tgtaagtgccctctctgaac

SEQ ID NO: 12486 - RNA, 20 nt, synthetic construct
  source 1..20: mol_type = other RNA
cgccctcatcctgttcagag

SEQ ID NO: 12487 - RNA, 20 nt, synthetic construct
  source 1..20: mol_type = other RNA
gccctcatcctgttcagaga

SEQ ID NO: 12488 - RNA, 20 nt, synthetic construct
  source 1..20: mol_type = other RNA
tgttcagagagggcacttac

SEQ ID NO: 12489 - RNA, 20 nt, synthetic construct
  source 1..20: mol_type = other RNA
gagagggcacttacaggcct

SEQ ID NO: 12490 - RNA, 20 nt, synthetic construct
  source 1..20: mol_type = other RNA
agggcacttacaggcctcgg

SEQ ID NO: 12491 - RNA, 20 nt, synthetic construct
  source 1..20: mol_type = other RNA
gagaccctcccctgcctccg

SEQ ID NO: 12492 - RNA, 20 nt, synthetic construct
  source 1..20: mol_type = other RNA
cacttacaggcctcggaggc

SEQ ID NO: 12493 - RNA, 20 nt, synthetic construct
  source 1..20: mol_type = other RNA
acttacaggcctcggaggca

SEQ ID NO: 12494 - RNA, 20 nt, synthetic construct
  source 1..20: mol_type = other RNA
cttacaggcctcggaggcag

SEQ ID NO: 12495 - RNA, 20 nt, synthetic construct
  source 1..20: mol_type = other RNA
acaggcctcggaggcagggg

SEQ ID NO: 12496 - RNA, 20 nt, synthetic construct
  source 1..20: mol_type = other RNA
caggcctcggaggcagggga

SEQ ID NO: 12497 - RNA, 20 nt, synthetic construct
  source 1..20: mol_type = other RNA
ggcaggggagggtctcctcc

SEQ ID NO: 12498 - RNA, 20 nt, synthetic construct
  source 1..20: mol_type = other RNA
gcaggggagggtctcctcct

SEQ ID NO: 12499 - RNA, 20 nt, synthetic construct
  source 1..20: mol_type = other RNA
caggggagggtctcctcctg

SEQ ID NO: 12500 - RNA, 20 nt, synthetic construct
  source 1..20: mol_type = other RNA
gacggggatggttccccagg

SEQ ID NO: 12501 - RNA, 20 nt, synthetic construct
  source 1..20: mol_type = other RNA
ctggacggggatggttcccc

SEQ ID NO: 12502 - RNA, 20 nt, synthetic construct
  source 1..20: mol_type = other RNA
gggcaccatctggacgggga

SEQ ID NO: 12503 - RNA, 20 nt, synthetic construct
  source 1..20: mol_type = other RNA
ttgggggcaccatctggacg

SEQ ID NO: 12504 - RNA, 20 nt, synthetic construct
  source 1..20: mol_type = other RNA
gttgggggcaccatctggac

SEQ ID NO: 12505 - RNA, 20 nt, synthetic construct
  source 1..20: mol_type = other RNA
gggaaccatccccgtccaga

SEQ ID NO: 12506 - RNA, 20 nt, synthetic construct
  source 1..20: mol_type = other RNA
ggttgggggcaccatctgga

SEQ ID NO: 12507 - RNA, 20 nt, synthetic construct
  source 1..20: mol_type = other RNA
agctggttgggggcaccatc

SEQ ID NO: 12508 - RNA, 20 nt, synthetic construct
  source 1..20: mol_type = other RNA
atgccgccgcagctggttgg

SEQ ID NO: 12509 - RNA, 20 nt, synthetic construct
  source 1..20: mol_type = other RNA
catgccgccgcagctggttg

SEQ ID NO: 12510 - RNA, 20 nt, synthetic construct
  source 1..20: mol_type = other RNA
tcatgccgccgcagctggtt

SEQ ID NO: 12511 - RNA, 20 nt, synthetic construct
  source 1..20: mol_type = other RNA
atcatgccgccgcagctggt

SEQ ID NO: 12512 - RNA, 20 nt, synthetic construct
  source 1..20: mol_type = other RNA
atggtgcccccaaccagctg

SEQ ID NO: 12513 - RNA, 20 nt, synthetic construct
  source 1..20: mol_type = other RNA
ccagatcatgccgccgcagc

SEQ ID NO: 12514 - RNA, 20 nt, synthetic construct
  source 1..20: mol_type = other RNA
gtgcccccaaccagctgcgg

SEQ ID NO: 12515 - RNA, 20 nt, synthetic construct
  source 1..20: mol_type = other RNA
ccagctgcggcggcatgatc

SEQ ID NO: 12516 - RNA, 20 nt, synthetic construct
  source 1..20: mol_type = other RNA
cagctgcggcggcatgatct

SEQ ID NO: 12517 - RNA, 20 nt, synthetic construct
  source 1..20: mol_type = other RNA
ctgcggcggcatgatctggg

SEQ ID NO: 12518 - RNA, 20 nt, synthetic construct
  source 1..20: mol_type = other RNA
ggcggcatgatctgggcggc

SEQ ID NO: 12519 - RNA, 20 nt, synthetic construct
  source 1..20: mol_type = other RNA
atgatctgggcggctggtcc

SEQ ID NO: 12520 - RNA, 20 nt, synthetic construct
  source 1..20: mol_type = other RNA
tgatctgggcggctggtcca

SEQ ID NO: 12521 - RNA, 20 nt, synthetic construct
  source 1..20: mol_type = other RNA
tgggcggctggtccagggca

SEQ ID NO: 12522 - RNA, 20 nt, synthetic construct
  source 1..20: mol_type = other RNA
gggcggctggtccagggcat

SEQ ID NO: 12523 - RNA, 20 nt, synthetic construct
  source 1..20: mol_type = other RNA
acgatccgcaacccatgccc

SEQ ID NO: 12524 - RNA, 20 nt, synthetic construct
  source 1..20: mol_type = other RNA
ctggtccagggcatgggttg

SEQ ID NO: 12525 - RNA, 20 nt, synthetic construct
  source 1..20: mol_type = other RNA
gcatgggttgcggatcgtgt

SEQ ID NO: 12526 - RNA, 20 nt, synthetic construct
  source 1..20: mol_type = other RNA
catgggttgcggatcgtgta

SEQ ID NO: 12527 - RNA, 20 nt, synthetic construct
  source 1..20: mol_type = other RNA
ttgcggatcgtgtagggaag

SEQ ID NO: 12528 - RNA, 20 nt, synthetic construct
  source 1..20: mol_type = other RNA
tgcggatcgtgtagggaaga

SEQ ID NO: 12529 - RNA, 20 nt, synthetic construct
  source 1..20: mol_type = other RNA
gcggatcgtgtagggaagag

SEQ ID NO: 12530 - RNA, 20 nt, synthetic construct
  source 1..20: mol_type = other RNA
tttgatgcgtacttggagta

SEQ ID NO: 12531 - RNA, 20 nt, synthetic construct
  source 1..20: mol_type = other RNA
ctttgatgcgtacttggagt

SEQ ID NO: 12532 - RNA, 20 nt, synthetic construct
  source 1..20: mol_type = other RNA
cgacgtctttgatgcgtact

SEQ ID NO: 12533 - RNA, 20 nt, synthetic construct
  source 1..20: mol_type = other RNA
gggcctttacgatgctgact

SEQ ID NO: 12534 - RNA, 20 nt, synthetic construct
  source 1..20: mol_type = other RNA
gctccgagtcagcatcgtaa

SEQ ID NO: 12535 - RNA, 20 nt, synthetic construct
  source 1..20: mol_type = other RNA
agcatcgtaaaggcccgagc

SEQ ID NO: 12536 - RNA, 20 nt, synthetic construct
  source 1..20: mol_type = other RNA
gcatcgtaaaggcccgagcc

SEQ ID NO: 12537 - RNA, 20 nt, synthetic construct
  source 1..20: mol_type = other RNA
catcgtaaaggcccgagccg

SEQ ID NO: 12538 - RNA, 20 nt, synthetic construct
  source 1..20: mol_type = other RNA
gtgctctccgaccccggctc

SEQ ID NO: 12539 - RNA, 20 nt, synthetic construct
  source 1..20: mol_type = other RNA
cgtgctctccgaccccggct

SEQ ID NO: 12540 - RNA, 20 nt, synthetic construct
  source 1..20: mol_type = other RNA
gtaaaggcccgagccggggt

SEQ ID NO: 12541 - RNA, 20 nt, synthetic construct
  source 1..20: mol_type = other RNA
ctcggcgtgctctccgaccc

SEQ ID NO: 12542 - RNA, 20 nt, synthetic construct
  source 1..20: mol_type = other RNA
cggggtcggagagcacgccg

SEQ ID NO: 12543 - RNA, 20 nt, synthetic construct
  source 1..20: mol_type = other RNA
gaccaggcgctcgtggacct

SEQ ID NO: 12544 - RNA, 20 nt, synthetic construct
  source 1..20: mol_type = other RNA
ggacatggaccaggcgctcg

SEQ ID NO: 12545 - RNA, 20 nt, synthetic construct
  source 1..20: mol_type = other RNA
cgccgaggtccacgagcgcc

SEQ ID NO: 12546 - RNA, 20 nt, synthetic construct
  source 1..20: mol_type = other RNA
cctgcccgaggacatggacc

SEQ ID NO: 12547 - RNA, 20 nt, synthetic construct
  source 1..20: mol_type = other RNA
gagcgcctggtccatgtcct

SEQ ID NO: 12548 - RNA, 20 nt, synthetic construct
  source 1..20: mol_type = other RNA
cgtcttcctgcccgaggaca

SEQ ID NO: 12549 - RNA, 20 nt, synthetic construct
  source 1..20: mol_type = other RNA
agcgcctggtccatgtcctc

SEQ ID NO: 12550 - RNA, 20 nt, synthetic construct
  source 1..20: mol_type = other RNA
cctggtccatgtcctcgggc

SEQ ID NO: 12551 - RNA, 20 nt, synthetic construct
  source 1..20: mol_type = other RNA
gggcctcgtcttcctgcccg

SEQ ID NO: 12552 - RNA, 20 nt, synthetic construct
  source 1..20: mol_type = other RNA
tgtcctcgggcaggaagacg

SEQ ID NO: 12553 - RNA, 20 nt, synthetic construct
  source 1..20: mol_type = other RNA
ggaagacgaggcccacgttg

SEQ ID NO: 12554 - RNA, 20 nt, synthetic construct
  source 1..20: mol_type = other RNA
gagtacatcgtcctcaacgt

SEQ ID NO: 12555 - RNA, 20 nt, synthetic construct
  source 1..20: mol_type = other RNA
ggagtacatcgtcctcaacg

SEQ ID NO: 12556 - RNA, 20 nt, synthetic construct
  source 1..20: mol_type = other RNA
tgaggacgatgtactccatg

SEQ ID NO: 12557 - RNA, 20 nt, synthetic construct
  source 1..20: mol_type = other RNA
gacgatgtactccatgagga

SEQ ID NO: 12558 - RNA, 20 nt, synthetic construct
  source 1..20: mol_type = other RNA
cctgtactacgccttcctca

SEQ ID NO: 12559 - RNA, 20 nt, synthetic construct
  source 1..20: mol_type = other RNA
ccatgaggaaggcgtagtac

SEQ ID NO: 12560 - RNA, 20 nt, synthetic construct
  source 1..20: mol_type = other RNA
tcagcacattgacgaagaac

SEQ ID NO: 12561 - RNA, 20 nt, synthetic construct
  source 1..20: mol_type = other RNA
ctgccctctatgttctacgt

SEQ ID NO: 12562 - RNA, 20 nt, synthetic construct
  source 1..20: mol_type = other RNA
gctgccctctatgttctacg

SEQ ID NO: 12563 - RNA, 20 nt, synthetic construct
  source 1..20: mol_type = other RNA
caggcccacgtagaacatag

SEQ ID NO: 12564 - RNA, 20 nt, synthetic construct
  source 1..20: mol_type = other RNA
aggcccacgtagaacataga

SEQ ID NO: 12565 - RNA, 20 nt, synthetic construct
  source 1..20: mol_type = other RNA
tagaacatagagggcagcag

SEQ ID NO: 12566 - RNA, 20 nt, synthetic construct
  source 1..20: mol_type = other RNA
aacatagagggcagcagcgg

SEQ ID NO: 12567 - RNA, 20 nt, synthetic construct
  source 1..20: mol_type = other RNA
atagagggcagcagcggcgg

SEQ ID NO: 12568 - RNA, 20 nt, synthetic construct
  source 1..20: mol_type = other RNA
cagcagcggcggcggcacgt

SEQ ID NO: 12569 - RNA, 20 nt, synthetic construct
  source 1..20: mol_type = other RNA
agcagcggcggcggcacgta

SEQ ID NO: 12570 - RNA, 20 nt, synthetic construct
  source 1..20: mol_type = other RNA
gcagcggcggcggcacgtag

SEQ ID NO: 12571 - RNA, 20 nt, synthetic construct
  source 1..20: mol_type = other RNA
gcggcggcacgtaggggacc

SEQ ID NO: 12572 - RNA, 20 nt, synthetic construct
  source 1..20: mol_type = other RNA
cggcggcacgtaggggacca

SEQ ID NO: 12573 - RNA, 20 nt, synthetic construct
  source 1..20: mol_type = other RNA
ggcggcacgtaggggaccag

SEQ ID NO: 12574 - RNA, 20 nt, synthetic construct
  source 1..20: mol_type = other RNA
gcggcacgtaggggaccagg

SEQ ID NO: 12575 - RNA, 20 nt, synthetic construct
  source 1..20: mol_type = other RNA
cctggacgcactgggccccc

SEQ ID NO: 12576 - RNA, 20 nt, synthetic construct
  source 1..20: mol_type = other RNA
gcggcccacctggacgcact

SEQ ID NO: 12577 - RNA, 20 nt, synthetic construct
  source 1..20: mol_type = other RNA
cgcggcccacctggacgcac

SEQ ID NO: 12578 - RNA, 20 nt, synthetic construct
  source 1..20: mol_type = other RNA
ccagggggcccagtgcgtcc

SEQ ID NO: 12579 - RNA, 20 nt, synthetic construct
  source 1..20: mol_type = other RNA
gggggcccagtgcgtccagg

SEQ ID NO: 12580 - RNA, 20 nt, synthetic construct
  source 1..20: mol_type = other RNA
ggggcccagtgcgtccaggt

SEQ ID NO: 12581 - RNA, 20 nt, synthetic construct
  source 1..20: mol_type = other RNA
cgcccgggtcgcggcccacc

SEQ ID NO: 12582 - RNA, 20 nt, synthetic construct
  source 1..20: mol_type = other RNA
cgtccaggtgggccgcgacc

SEQ ID NO: 12583 - RNA, 20 nt, synthetic construct
  source 1..20: mol_type = other RNA
gtccaggtgggccgcgaccc

SEQ ID NO: 12584 - RNA, 20 nt, synthetic construct
  source 1..20: mol_type = other RNA
catgctcggcgcccgggtcg

SEQ ID NO: 12585 - RNA, 20 nt, synthetic construct
  source 1..20: mol_type = other RNA
ccgctgcatgctcggcgccc

SEQ ID NO: 12586 - RNA, 20 nt, synthetic construct
  source 1..20: mol_type = other RNA
cccgctgcatgctcggcgcc

SEQ ID NO: 12587 - RNA, 20 nt, synthetic construct
  source 1..20: mol_type = other RNA
cttgccacccgctgcatgct

SEQ ID NO: 12588 - RNA, 20 nt, synthetic construct
  source 1..20: mol_type = other RNA
cccgggcgccgagcatgcag

SEQ ID NO: 12589 - RNA, 20 nt, synthetic construct
  source 1..20: mol_type = other RNA
ccgggcgccgagcatgcagc

SEQ ID NO: 12590 - RNA, 20 nt, synthetic construct
  source 1..20: mol_type = other RNA
ggcgccgagcatgcagcggg

SEQ ID NO: 12591 - RNA, 20 nt, synthetic construct
  source 1..20: mol_type = other RNA
cgagcatgcagcgggtggca

SEQ ID NO: 12592 - RNA, 20 nt, synthetic construct
  source 1..20: mol_type = other RNA
gagcatgcagcgggtggcaa

SEQ ID NO: 12593 - RNA, 20 nt, synthetic construct
  source 1..20: mol_type = other RNA
catgcagcgggtggcaaggg

SEQ ID NO: 12594 - RNA, 20 nt, synthetic construct
  source 1..20: mol_type = other RNA
gcagcgggtggcaagggcgg

SEQ ID NO: 12595 - RNA, 20 nt, synthetic construct
  source 1..20: mol_type = other RNA
gggtggcaagggcggcggcc

SEQ ID NO: 12596 - RNA, 20 nt, synthetic construct
  source 1..20: mol_type = other RNA
ctgagttcgccgggatcgcc

SEQ ID NO: 12597 - RNA, 20 nt, synthetic construct
  source 1..20: mol_type = other RNA
gctgagttcgccgggatcgc

SEQ ID NO: 12598 - RNA, 20 nt, synthetic construct
  source 1..20: mol_type = other RNA
gggcggcggcccggcgatcc

SEQ ID NO: 12599 - RNA, 20 nt, synthetic construct
  source 1..20: mol_type = other RNA
ccgcagcggctgagttcgcc

SEQ ID NO: 12600 - RNA, 20 nt, synthetic construct
  source 1..20: mol_type = other RNA
gccgcagcggctgagttcgc

SEQ ID NO: 12601 - RNA, 20 nt, synthetic construct
  source 1..20: mol_type = other RNA
cccggcgaactcagccgctg

SEQ ID NO: 12602 - RNA, 20 nt, synthetic construct
  source 1..20: mol_type = other RNA
cggccgcccgggcgccgcag

SEQ ID NO: 12603 - RNA, 20 nt, synthetic construct
  source 1..20: mol_type = other RNA
aactcagccgctgcggcgcc

SEQ ID NO: 12604 - RNA, 20 nt, synthetic construct
  source 1..20: mol_type = other RNA
actcagccgctgcggcgccc

SEQ ID NO: 12605 - RNA, 20 nt, synthetic construct
  source 1..20: mol_type = other RNA
cagccgctgcggcgcccggg

SEQ ID NO: 12606 - RNA, 20 nt, synthetic construct
  source 1..20: mol_type = other RNA
tgtgccctcgccggccgccc

SEQ ID NO: 12607 - RNA, 20 nt, synthetic construct
  source 1..20: mol_type = other RNA
cgctgcggcgcccgggcggc

SEQ ID NO: 12608 - RNA, 20 nt, synthetic construct
  source 1..20: mol_type = other RNA
ctgtgccctcgccggccgcc

SEQ ID NO: 12609 - RNA, 20 nt, synthetic construct
  source 1..20: mol_type = other RNA
cggcgcccgggcggccggcg

SEQ ID NO: 12610 - RNA, 20 nt, synthetic construct
  source 1..20: mol_type = other RNA
ggcgcccgggcggccggcga

SEQ ID NO: 12611 - RNA, 20 nt, synthetic construct
  source 1..20: mol_type = other RNA
tggctgcgctgtgccctcgc

SEQ ID NO: 12612 - RNA, 20 nt, synthetic construct
  source 1..20: mol_type = other RNA
agggcacagcgcagccatcc

SEQ ID NO: 12613 - RNA, 20 nt, synthetic construct
  source 1..20: mol_type = other RNA
gggcacagcgcagccatcca

SEQ ID NO: 12614 - RNA, 20 nt, synthetic construct
  source 1..20: mol_type = other RNA
ggcacagcgcagccatccag

SEQ ID NO: 12615 - RNA, 20 nt, synthetic construct
  source 1..20: mol_type = other RNA
ggctccagggtacccctgga

SEQ ID NO: 12616 - RNA, 20 nt, synthetic construct
  source 1..20: mol_type = other RNA
gtcgggctccagggtacccc

SEQ ID NO: 12617 - RNA, 20 nt, synthetic construct
  source 1..20: mol_type = other RNA
gcagccatccaggggtaccc

SEQ ID NO: 12618 - RNA, 20 nt, synthetic construct
  source 1..20: mol_type = other RNA
cctgcttctgtcgggctcca

SEQ ID NO: 12619 - RNA, 20 nt, synthetic construct
  source 1..20: mol_type = other RNA
ccctgcttctgtcgggctcc

SEQ ID NO: 12620 - RNA, 20 nt, synthetic construct
  source 1..20: mol_type = other RNA
agcccggccctgcttctgtc

SEQ ID NO: 12621 - RNA, 20 nt, synthetic construct
  source 1..20: mol_type = other RNA
gagcccggccctgcttctgt

SEQ ID NO: 12622 - RNA, 20 nt, synthetic construct
  source 1..20: mol_type = other RNA
ccctggagcccgacagaagc

SEQ ID NO: 12623 - RNA, 20 nt, synthetic construct
  source 1..20: mol_type = other RNA
cctggagcccgacagaagca

SEQ ID NO: 12624 - RNA, 20 nt, synthetic construct
  source 1..20: mol_type = other RNA
gagcccgacagaagcagggc

SEQ ID NO: 12625 - RNA, 20 nt, synthetic construct
  source 1..20: mol_type = other RNA
agcccgacagaagcagggcc

SEQ ID NO: 12626 - RNA, 20 nt, synthetic construct
  source 1..20: mol_type = other RNA
gccaggggacatctggagcc

SEQ ID NO: 12627 - RNA, 20 nt, synthetic construct
  source 1..20: mol_type = other RNA
cgcaattgccaggggacatc

SEQ ID NO: 12628 - RNA, 20 nt, synthetic construct
  source 1..20: mol_type = other RNA
gccgggctccagatgtcccc

SEQ ID NO: 12629 - RNA, 20 nt, synthetic construct
  source 1..20: mol_type = other RNA
ggtcggggcgcaattgccag

SEQ ID NO: 12630 - RNA, 20 nt, synthetic construct
  source 1..20: mol_type = other RNA
gggtcggggcgcaattgcca

SEQ ID NO: 12631 - RNA, 20 nt, synthetic construct
  source 1..20: mol_type = other RNA
ggggtcggggcgcaattgcc

SEQ ID NO: 12632 - RNA, 20 nt, synthetic construct
  source 1..20: mol_type = other RNA
ccggcgcatttcgggggtcg

SEQ ID NO: 12633 - RNA, 20 nt, synthetic construct
  source 1..20: mol_type = other RNA
cccggcgcatttcgggggtc

SEQ ID NO: 12634 - RNA, 20 nt, synthetic construct
  source 1..20: mol_type = other RNA
gcccggcgcatttcgggggt

SEQ ID NO: 12635 - RNA, 20 nt, synthetic construct
  source 1..20: mol_type = other RNA
acccgcccggcgcatttcgg

SEQ ID NO: 12636 - RNA, 20 nt, synthetic construct
  source 1..20: mol_type = other RNA
gacccgcccggcgcatttcg

SEQ ID NO: 12637 - RNA, 20 nt, synthetic construct
  source 1..20: mol_type = other RNA
tgacccgcccggcgcatttc

SEQ ID NO: 12638 - RNA, 20 nt, synthetic construct
  source 1..20: mol_type = other RNA
gtgacccgcccggcgcattt

SEQ ID NO: 12639 - RNA, 20 nt, synthetic construct
  source 1..20: mol_type = other RNA
ccccgacccccgaaatgcgc

SEQ ID NO: 12640 - RNA, 20 nt, synthetic construct
  source 1..20: mol_type = other RNA
cccgacccccgaaatgcgcc

SEQ ID NO: 12641 - RNA, 20 nt, synthetic construct
  source 1..20: mol_type = other RNA
gacccccgaaatgcgccggg

SEQ ID NO: 12642 - RNA, 20 nt, synthetic construct
  source 1..20: mol_type = other RNA
acccccgaaatgcgccgggc

SEQ ID NO: 12643 - RNA, 20 nt, synthetic construct
  source 1..20: mol_type = other RNA
tcggggtgcggtgacccgcc

SEQ ID NO: 12644 - RNA, 20 nt, synthetic construct
  source 1..20: mol_type = other RNA
tgggggcacatctcggggtg

SEQ ID NO: 12645 - RNA, 20 nt, synthetic construct
  source 1..20: mol_type = other RNA
atccttgggggcacatctcg

SEQ ID NO: 12646 - RNA, 20 nt, synthetic construct
  source 1..20: mol_type = other RNA
gatccttgggggcacatctc

SEQ ID NO: 12647 - RNA, 20 nt, synthetic construct
  source 1..20: mol_type = other RNA
agatccttgggggcacatct

SEQ ID NO: 12648 - RNA, 20 nt, synthetic construct
  source 1..20: mol_type = other RNA
caccccgagatgtgccccca

SEQ ID NO: 12649 - RNA, 20 nt, synthetic construct
  source 1..20: mol_type = other RNA
ggcggtcgagagatccttgg

SEQ ID NO: 12650 - RNA, 20 nt, synthetic construct
  source 1..20: mol_type = other RNA
gggcggtcgagagatccttg

SEQ ID NO: 12651 - RNA, 20 nt, synthetic construct
  source 1..20: mol_type = other RNA
cgggcggtcgagagatcctt

SEQ ID NO: 12652 - RNA, 20 nt, synthetic construct
  source 1..20: mol_type = other RNA
ccgggcggtcgagagatcct

SEQ ID NO: 12653 - RNA, 20 nt, synthetic construct
  source 1..20: mol_type = other RNA
ccaaggatctctcgaccgcc

SEQ ID NO: 12654 - RNA, 20 nt, synthetic construct
  source 1..20: mol_type = other RNA
caaggatctctcgaccgccc

SEQ ID NO: 12655 - RNA, 20 nt, synthetic construct
  source 1..20: mol_type = other RNA
ggatctctcgaccgcccggg

SEQ ID NO: 12656 - RNA, 20 nt, synthetic construct
  source 1..20: mol_type = other RNA
ggcccgcctcgccgcccggg

SEQ ID NO: 12657 - RNA, 20 nt, synthetic construct
  source 1..20: mol_type = other RNA
gggggcccgcctcgccgccc

SEQ ID NO: 12658 - RNA, 20 nt, synthetic construct
  source 1..20: mol_type = other RNA
ggggggcccgcctcgccgcc

SEQ ID NO: 12659 - RNA, 20 nt, synthetic construct
  source 1..20: mol_type = other RNA
tctcgaccgcccgggcggcg

SEQ ID NO: 12660 - RNA, 20 nt, synthetic construct
  source 1..20: mol_type = other RNA
cgaccgcccgggcggcgagg

SEQ ID NO: 12661 - RNA, 20 nt, synthetic construct
  source 1..20: mol_type = other RNA
gaccgcccgggcggcgaggc

SEQ ID NO: 12662 - RNA, 20 nt, synthetic construct
  source 1..20: mol_type = other RNA
agccgcgggccacttcaggg

SEQ ID NO: 12663 - RNA, 20 nt, synthetic construct
  source 1..20: mol_type = other RNA
cagccgcgggccacttcagg

SEQ ID NO: 12664 - RNA, 20 nt, synthetic construct
  source 1..20: mol_type = other RNA
cgaggcgggcccccctgaag

SEQ ID NO: 12665 - RNA, 20 nt, synthetic construct
  source 1..20: mol_type = other RNA
gcagccgcgggccacttcag

SEQ ID NO: 12666 - RNA, 20 nt, synthetic construct
  source 1..20: mol_type = other RNA
ggcagccgcgggccacttca

SEQ ID NO: 12667 - RNA, 20 nt, synthetic construct
  source 1..20: mol_type = other RNA
gggcagccgcgggccacttc

SEQ ID NO: 12668 - RNA, 20 nt, synthetic construct
  source 1..20: mol_type = other RNA
ggcccccctgaagtggcccg

SEQ ID NO: 12669 - RNA, 20 nt, synthetic construct
  source 1..20: mol_type = other RNA
cgagggagccgggcagccgc

SEQ ID NO: 12670 - RNA, 20 nt, synthetic construct
  source 1..20: mol_type = other RNA
acgagggagccgggcagccg

SEQ ID NO: 12671 - RNA, 20 nt, synthetic construct
  source 1..20: mol_type = other RNA
tgaagtggcccgcggctgcc

SEQ ID NO: 12672 - RNA, 20 nt, synthetic construct
  source 1..20: mol_type = other RNA
ggaggcgccacgagggagcc

SEQ ID NO: 12673 - RNA, 20 nt, synthetic construct
  source 1..20: mol_type = other RNA
gggaggcgccacgagggagc

SEQ ID NO: 12674 - RNA, 20 nt, synthetic construct
  source 1..20: mol_type = other RNA
gcggctgcccggctccctcg

SEQ ID NO: 12675 - RNA, 20 nt, synthetic construct
  source 1..20: mol_type = other RNA
gcgccagggaggcgccacga

SEQ ID NO: 12676 - RNA, 20 nt, synthetic construct
  source 1..20: mol_type = other RNA
agcgccagggaggcgccacg

SEQ ID NO: 12677 - RNA, 20 nt, synthetic construct
  source 1..20: mol_type = other RNA
gctccctcgtggcgcctccc

SEQ ID NO: 12678 - RNA, 20 nt, synthetic construct
  source 1..20: mol_type = other RNA
aggccctgcgagcgccaggg

SEQ ID NO: 12679 - RNA, 20 nt, synthetic construct
  source 1..20: mol_type = other RNA
gcgaggccctgcgagcgcca

SEQ ID NO: 12680 - RNA, 20 nt, synthetic construct
  source 1..20: mol_type = other RNA
tgcgaggccctgcgagcgcc

SEQ ID NO: 12681 - RNA, 20 nt, synthetic construct
  source 1..20: mol_type = other RNA
ggcgcctccctggcgctcgc

SEQ ID NO: 12682 - RNA, 20 nt, synthetic construct
  source 1..20: mol_type = other RNA
gcgcctccctggcgctcgca

SEQ ID NO: 12683 - RNA, 20 nt, synthetic construct
  source 1..20: mol_type = other RNA
ggatccccaccggctctgcg

SEQ ID NO: 12684 - RNA, 20 nt, synthetic construct
  source 1..20: mol_type = other RNA
ctcgcagggcctcgcagagc

SEQ ID NO: 12685 - RNA, 20 nt, synthetic construct
  source 1..20: mol_type = other RNA
gcagggcctcgcagagccgg

SEQ ID NO: 12686 - RNA, 20 nt, synthetic construct
  source 1..20: mol_type = other RNA
cagggcctcgcagagccggt

SEQ ID NO: 12687 - RNA, 20 nt, synthetic construct
  source 1..20: mol_type = other RNA
agggcctcgcagagccggtg

SEQ ID NO: 12688 - RNA, 20 nt, synthetic construct
  source 1..20: mol_type = other RNA
agccgcggtgggatccccac

SEQ ID NO: 12689 - RNA, 20 nt, synthetic construct
  source 1..20: mol_type = other RNA
agccggtggggatcccaccg

SEQ ID NO: 12690 - RNA, 20 nt, synthetic construct
  source 1..20: mol_type = other RNA
cctagacactgagccgcggt

SEQ ID NO: 12691 - RNA, 20 nt, synthetic construct
  source 1..20: mol_type = other RNA
ccctagacactgagccgcgg

SEQ ID NO: 12692 - RNA, 20 nt, synthetic construct
  source 1..20: mol_type = other RNA
cggccctagacactgagccg

SEQ ID NO: 12693 - RNA, 20 nt, synthetic construct
  source 1..20: mol_type = other RNA
cccaccgcggctcagtgtct

SEQ ID NO: 12694 - RNA, 20 nt, synthetic construct
  source 1..20: mol_type = other RNA
ccaccgcggctcagtgtcta

SEQ ID NO: 12695 - RNA, 20 nt, synthetic construct
  source 1..20: mol_type = other RNA
cgcggctcagtgtctagggc

SEQ ID NO: 12696 - RNA, 20 nt, synthetic construct
  source 1..20: mol_type = other RNA
tcagtgtctagggccggtcc

SEQ ID NO: 12697 - RNA, 20 nt, synthetic construct
  source 1..20: mol_type = other RNA
ggagagaaggctgccgggac

SEQ ID NO: 12698 - RNA, 20 nt, synthetic construct
  source 1..20: mol_type = other RNA
gggcgggagagaaggctgcc

SEQ ID NO: 12699 - RNA, 20 nt, synthetic construct
  source 1..20: mol_type = other RNA
ggggcgggagagaaggctgc

SEQ ID NO: 12700 - RNA, 20 nt, synthetic construct
  source 1..20: mol_type = other RNA
gcggggcggggcgggagaga

SEQ ID NO: 12701 - RNA, 20 nt, synthetic construct
  source 1..20: mol_type = other RNA
gaggacctgcggggcggggc

SEQ ID NO: 12702 - RNA, 20 nt, synthetic construct
  source 1..20: mol_type = other RNA
cgaggacctgcggggcgggg

SEQ ID NO: 12703 - RNA, 20 nt, synthetic construct
  source 1..20: mol_type = other RNA
gcgcgaggacctgcggggcg

SEQ ID NO: 12704 - RNA, 20 nt, synthetic construct
  source 1..20: mol_type = other RNA
tgcgcgaggacctgcggggc

SEQ ID NO: 12705 - RNA, 20 nt, synthetic construct
  source 1..20: mol_type = other RNA
tctctcccgccccgccccgc

SEQ ID NO: 12706 - RNA, 20 nt, synthetic construct
  source 1..20: mol_type = other RNA
gtgcgcgaggacctgcgggg

SEQ ID NO: 12707 - RNA, 20 nt, synthetic construct
  source 1..20: mol_type = other RNA
ggggtgcgcgaggacctgcg

SEQ ID NO: 12708 - RNA, 20 nt, synthetic construct
  source 1..20: mol_type = other RNA
gggggtgcgcgaggacctgc

SEQ ID NO: 12709 - RNA, 20 nt, synthetic construct
  source 1..20: mol_type = other RNA
ggggggtgcgcgaggacctg

SEQ ID NO: 12710 - RNA, 20 nt, synthetic construct
  source 1..20: mol_type = other RNA
gggggcgcggggggtgcgcg

SEQ ID NO: 12711 - RNA, 20 nt, synthetic construct
  source 1..20: mol_type = other RNA
tgggcctgcgggggcgcggg

SEQ ID NO: 12712 - RNA, 20 nt, synthetic construct
  source 1..20: mol_type = other RNA
ctgggcctgcgggggcgcgg

SEQ ID NO: 12713 - RNA, 20 nt, synthetic construct
  source 1..20: mol_type = other RNA
gctgggcctgcgggggcgcg

SEQ ID NO: 12714 - RNA, 20 nt, synthetic construct
  source 1..20: mol_type = other RNA
tgctgggcctgcgggggcgc

SEQ ID NO: 12715 - RNA, 20 nt, synthetic construct
  source 1..20: mol_type = other RNA
gtgctgggcctgcgggggcg

SEQ ID NO: 12716 - RNA, 20 nt, synthetic construct
  source 1..20: mol_type = other RNA
cgcaccccccgcgcccccgc

SEQ ID NO: 12717 - RNA, 20 nt, synthetic construct
  source 1..20: mol_type = other RNA
catgggtgctgggcctgcgg

SEQ ID NO: 12718 - RNA, 20 nt, synthetic construct
  source 1..20: mol_type = other RNA
ccatgggtgctgggcctgcg

SEQ ID NO: 12719 - RNA, 20 nt, synthetic construct
  source 1..20: mol_type = other RNA
gccatgggtgctgggcctgc

SEQ ID NO: 12720 - RNA, 20 nt, synthetic construct
  source 1..20: mol_type = other RNA
agccatgggtgctgggcctg

SEQ ID NO: 12721 - RNA, 20 nt, synthetic construct
  source 1..20: mol_type = other RNA
cggccgcagccatgggtgct

SEQ ID NO: 12722 - RNA, 20 nt, synthetic construct
  source 1..20: mol_type = other RNA
gcggccgcagccatgggtgc

SEQ ID NO: 12723 - RNA, 20 nt, synthetic construct
  source 1..20: mol_type = other RNA
ccccgcaggcccagcaccca

SEQ ID NO: 12724 - RNA, 20 nt, synthetic construct
  source 1..20: mol_type = other RNA
tacgcggcggccgcagccat

SEQ ID NO: 12725 - RNA, 20 nt, synthetic construct
  source 1..20: mol_type = other RNA
aggcccagcacccatggctg

SEQ ID NO: 12726 - RNA, 20 nt, synthetic construct
  source 1..20: mol_type = other RNA
ctacgcggcggccgcagcca

SEQ ID NO: 12727 - RNA, 20 nt, synthetic construct
  source 1..20: mol_type = other RNA
ccaccgggagggctacgcgg

SEQ ID NO: 12728 - RNA, 20 nt, synthetic construct
  source 1..20: mol_type = other RNA
gcgccaccgggagggctacg

SEQ ID NO: 12729 - RNA, 20 nt, synthetic construct
  source 1..20: mol_type = other RNA
cggccgccgcgtagccctcc

SEQ ID NO: 12730 - RNA, 20 nt, synthetic construct
  source 1..20: mol_type = other RNA
ccgccgcgtagccctcccgg

SEQ ID NO: 12731 - RNA, 20 nt, synthetic construct
  source 1..20: mol_type = other RNA
agctccgagcgccaccggga

SEQ ID NO: 12732 - RNA, 20 nt, synthetic construct
  source 1..20: mol_type = other RNA
gagctccgagcgccaccggg

SEQ ID NO: 12733 - RNA, 20 nt, synthetic construct
  source 1..20: mol_type = other RNA
gcggagctccgagcgccacc

SEQ ID NO: 12734 - RNA, 20 nt, synthetic construct
  source 1..20: mol_type = other RNA
ggcggagctccgagcgccac

SEQ ID NO: 12735 - RNA, 20 nt, synthetic construct
  source 1..20: mol_type = other RNA
gtagccctcccggtggcgct

SEQ ID NO: 12736 - RNA, 20 nt, synthetic construct
  source 1..20: mol_type = other RNA
gctcggggcccctcgggagg

SEQ ID NO: 12737 - RNA, 20 nt, synthetic construct
  source 1..20: mol_type = other RNA
gctcggagctccgcctcccg

SEQ ID NO: 12738 - RNA, 20 nt, synthetic construct
  source 1..20: mol_type = other RNA
ctcggagctccgcctcccga

SEQ ID NO: 12739 - RNA, 20 nt, synthetic construct
  source 1..20: mol_type = other RNA
tcggagctccgcctcccgag

SEQ ID NO: 12740 - RNA, 20 nt, synthetic construct
  source 1..20: mol_type = other RNA
tgagctcggggcccctcggg

SEQ ID NO: 12741 - RNA, 20 nt, synthetic construct
  source 1..20: mol_type = other RNA
caatgagctcggggcccctc

SEQ ID NO: 12742 - RNA, 20 nt, synthetic construct
  source 1..20: mol_type = other RNA
ccaatgagctcggggcccct

SEQ ID NO: 12743 - RNA, 20 nt, synthetic construct
  source 1..20: mol_type = other RNA
gcggcctgccaatgagctcg

SEQ ID NO: 12744 - RNA, 20 nt, synthetic construct
  source 1..20: mol_type = other RNA
ggcggcctgccaatgagctc

SEQ ID NO: 12745 - RNA, 20 nt, synthetic construct
  source 1..20: mol_type = other RNA
gggcggcctgccaatgagct

SEQ ID NO: 12746 - RNA, 20 nt, synthetic construct
  source 1..20: mol_type = other RNA
ccgaggggccccgagctcat

SEQ ID NO: 12747 - RNA, 20 nt, synthetic construct
  source 1..20: mol_type = other RNA
ggggccccgagctcattggc

SEQ ID NO: 12748 - RNA, 20 nt, synthetic construct
  source 1..20: mol_type = other RNA
caattagcgcgtgcaggggg

SEQ ID NO: 12749 - RNA, 20 nt, synthetic construct
  source 1..20: mol_type = other RNA
ggccaattagcgcgtgcagg

SEQ ID NO: 12750 - RNA, 20 nt, synthetic construct
  source 1..20: mol_type = other RNA
cggccaattagcgcgtgcag

SEQ ID NO: 12751 - RNA, 20 nt, synthetic construct
  source 1..20: mol_type = other RNA
ccggccaattagcgcgtgca

SEQ ID NO: 12752 - RNA, 20 nt, synthetic construct
  source 1..20: mol_type = other RNA
gccggccaattagcgcgtgc

SEQ ID NO: 12753 - RNA, 20 nt, synthetic construct
  source 1..20: mol_type = other RNA
cgccccctgcacgcgctaat

SEQ ID NO: 12754 - RNA, 20 nt, synthetic construct
  source 1..20: mol_type = other RNA
ccctgcacgcgctaattggc

SEQ ID NO: 12755 - RNA, 20 nt, synthetic construct
  source 1..20: mol_type = other RNA
aatcagcgcgggcgttgagc

SEQ ID NO: 12756 - RNA, 20 nt, synthetic construct
  source 1..20: mol_type = other RNA
cggccggagccaatcagcgc

SEQ ID NO: 12757 - RNA, 20 nt, synthetic construct
  source 1..20: mol_type = other RNA
gcggccggagccaatcagcg

SEQ ID NO: 12758 - RNA, 20 nt, synthetic construct
  source 1..20: mol_type = other RNA
ggctcaacgcccgcgctgat

SEQ ID NO: 12759 - RNA, 20 nt, synthetic construct
  source 1..20: mol_type = other RNA
acgcccgcgctgattggctc

SEQ ID NO: 12760 - RNA, 20 nt, synthetic construct
  source 1..20: mol_type = other RNA
gctgattggctccggccgcc

SEQ ID NO: 12761 - RNA, 20 nt, synthetic construct
  source 1..20: mol_type = other RNA
ggtacccgccccctggcggc

SEQ ID NO: 12762 - RNA, 20 nt, synthetic construct
  source 1..20: mol_type = other RNA
ctgattggctccggccgcca

SEQ ID NO: 12763 - RNA, 20 nt, synthetic construct
  source 1..20: mol_type = other RNA
tgattggctccggccgccag

SEQ ID NO: 12764 - RNA, 20 nt, synthetic construct
  source 1..20: mol_type = other RNA
gattggctccggccgccagg

SEQ ID NO: 12765 - RNA, 20 nt, synthetic construct
  source 1..20: mol_type = other RNA
aagcggtacccgccccctgg

SEQ ID NO: 12766 - RNA, 20 nt, synthetic construct
  source 1..20: mol_type = other RNA
tggctccggccgccaggggg

SEQ ID NO: 12767 - RNA, 20 nt, synthetic construct
  source 1..20: mol_type = other RNA
ggctccggccgccagggggc

SEQ ID NO: 12768 - RNA, 20 nt, synthetic construct
  source 1..20: mol_type = other RNA
gcgaagcggtacccgccccc

SEQ ID NO: 12769 - RNA, 20 nt, synthetic construct
  source 1..20: mol_type = other RNA
ccccgaggggcggagcgaag

SEQ ID NO: 12770 - RNA, 20 nt, synthetic construct
  source 1..20: mol_type = other RNA
taccgcttcgctccgcccct

SEQ ID NO: 12771 - RNA, 20 nt, synthetic construct
  source 1..20: mol_type = other RNA
accgcttcgctccgcccctc

SEQ ID NO: 12772 - RNA, 20 nt, synthetic construct
  source 1..20: mol_type = other RNA
gacgctagggccccgagggg

SEQ ID NO: 12773 - RNA, 20 nt, synthetic construct
  source 1..20: mol_type = other RNA
ccgcttcgctccgcccctcg

SEQ ID NO: 12774 - RNA, 20 nt, synthetic construct
  source 1..20: mol_type = other RNA
tcagacgctagggccccgag

SEQ ID NO: 12775 - RNA, 20 nt, synthetic construct
  source 1..20: mol_type = other RNA
ctcagacgctagggccccga

SEQ ID NO: 12776 - RNA, 20 nt, synthetic construct
  source 1..20: mol_type = other RNA
actcagacgctagggccccg

SEQ ID NO: 12777 - RNA, 20 nt, synthetic construct
  source 1..20: mol_type = other RNA
ggaaagcaactcagacgcta

SEQ ID NO: 12778 - RNA, 20 nt, synthetic construct
  source 1..20: mol_type = other RNA
aggaaagcaactcagacgct

SEQ ID NO: 12779 - RNA, 20 nt, synthetic construct
  source 1..20: mol_type = other RNA
tagcgtctgagttgctttcc

SEQ ID NO: 12780 - RNA, 20 nt, synthetic construct
  source 1..20: mol_type = other RNA
tctgagttgctttcctggtt

SEQ ID NO: 12781 - RNA, 20 nt, synthetic construct
  source 1..20: mol_type = other RNA
ctgagttgctttcctggttc

SEQ ID NO: 12782 - RNA, 20 nt, synthetic construct
  source 1..20: mol_type = other RNA
tctgagggcagacccgaacc

SEQ ID NO: 12783 - RNA, 20 nt, synthetic construct
  source 1..20: mol_type = other RNA
gaattcgatttgagatctga

SEQ ID NO: 12784 - RNA, 20 nt, synthetic construct
  source 1..20: mol_type = other RNA
cgaattcgatttgagatctg

SEQ ID NO: 12785 - RNA, 20 nt, synthetic construct
  source 1..20: mol_type = other RNA
attcgctctgcgtatcgaat

SEQ ID NO: 12786 - RNA, 20 nt, synthetic construct
  source 1..20: mol_type = other RNA
ttcgctctgcgtatcgaata

SEQ ID NO: 12787 - RNA, 20 nt, synthetic construct
  source 1..20: mol_type = other RNA
tcgctctgcgtatcgaatag

SEQ ID NO: 12788 - RNA, 20 nt, synthetic construct
  source 1..20: mol_type = other RNA
cgctctgcgtatcgaatagg

SEQ ID NO: 12789 - RNA, 20 nt, synthetic construct
  source 1..20: mol_type = other RNA
tctgcgtatcgaataggggg

SEQ ID NO: 12790 - RNA, 20 nt, synthetic construct
  source 1..20: mol_type = other RNA
gcggccttagcattatgtct

SEQ ID NO: 12791 - RNA, 20 nt, synthetic construct
  source 1..20: mol_type = other RNA
caaacctagacataatgcta

SEQ ID NO: 12792 - RNA, 20 nt, synthetic construct
  source 1..20: mol_type = other RNA
cgggtttccttcggcttttg

SEQ ID NO: 12793 - RNA, 20 nt, synthetic construct
  source 1..20: mol_type = other RNA
gctaaggccgcaaaagccga

SEQ ID NO: 12794 - RNA, 20 nt, synthetic construct
  source 1..20: mol_type = other RNA
gcggtagcccgggtttcctt

SEQ ID NO: 12795 - RNA, 20 nt, synthetic construct
  source 1..20: mol_type = other RNA
cgcaaaagccgaaggaaacc

SEQ ID NO: 12796 - RNA, 20 nt, synthetic construct
  source 1..20: mol_type = other RNA
gcaaaagccgaaggaaaccc

SEQ ID NO: 12797 - RNA, 20 nt, synthetic construct
  source 1..20: mol_type = other RNA
gcaaggtgcagcggtagccc

SEQ ID NO: 12798 - RNA, 20 nt, synthetic construct
  source 1..20: mol_type = other RNA
agcaaggtgcagcggtagcc

SEQ ID NO: 12799 - RNA, 20 nt, synthetic construct
  source 1..20: mol_type = other RNA
aggcatgcagcaaggtgcag

SEQ ID NO: 12800 - RNA, 20 nt, synthetic construct
  source 1..20: mol_type = other RNA
tcccaaagaggcatgcagca

SEQ ID NO: 12801 - RNA, 20 nt, synthetic construct
  source 1..20: mol_type = other RNA
caccttgctgcatgcctctt

SEQ ID NO: 12802 - RNA, 20 nt, synthetic construct
  source 1..20: mol_type = other RNA
accttgctgcatgcctcttt

SEQ ID NO: 12803 - RNA, 20 nt, synthetic construct
  source 1..20: mol_type = other RNA
ggagaaacggagtcccaaag

SEQ ID NO: 12804 - RNA, 20 nt, synthetic construct
  source 1..20: mol_type = other RNA
gcctccttttaaaggagaaa

SEQ ID NO: 12805 - RNA, 20 nt, synthetic construct
  source 1..20: mol_type = other RNA
gactccgtttctcctttaaa

SEQ ID NO: 12806 - RNA, 20 nt, synthetic construct
  source 1..20: mol_type = other RNA
ccgaccccgcctccttttaa

SEQ ID NO: 12807 - RNA, 20 nt, synthetic construct
  source 1..20: mol_type = other RNA
tccgtttctcctttaaaagg

SEQ ID NO: 12808 - RNA, 20 nt, synthetic construct
  source 1..20: mol_type = other RNA
gtttctcctttaaaaggagg

SEQ ID NO: 12809 - RNA, 20 nt, synthetic construct
  source 1..20: mol_type = other RNA
tttctcctttaaaaggaggc

SEQ ID NO: 12810 - RNA, 20 nt, synthetic construct
  source 1..20: mol_type = other RNA
ttctcctttaaaaggaggcg

SEQ ID NO: 12811 - RNA, 20 nt, synthetic construct
  source 1..20: mol_type = other RNA
cctttaaaaggaggcggggt

SEQ ID NO: 12812 - RNA, 20 nt, synthetic construct
  source 1..20: mol_type = other RNA
ctttaaaaggaggcggggtc

SEQ ID NO: 12813 - RNA, 20 nt, synthetic construct
  source 1..20: mol_type = other RNA
tttaaaaggaggcggggtcg

SEQ ID NO: 12814 - RNA, 20 nt, synthetic construct
  source 1..20: mol_type = other RNA
aaaaggaggcggggtcgggg

SEQ ID NO: 12815 - RNA, 20 nt, synthetic construct
  source 1..20: mol_type = other RNA
aaaggaggcggggtcgggga

SEQ ID NO: 12816 - RNA, 20 nt, synthetic construct
  source 1..20: mol_type = other RNA
aaggaggcggggtcggggag

SEQ ID NO: 12817 - RNA, 20 nt, synthetic construct
  source 1..20: mol_type = other RNA
gcggggtcggggaggggcga

SEQ ID NO: 12818 - RNA, 20 nt, synthetic construct
  source 1..20: mol_type = other RNA
ggtcggggaggggcgacgga

SEQ ID NO: 12819 - RNA, 20 nt, synthetic construct
  source 1..20: mol_type = other RNA
ggggcgacggacggttgccc

SEQ ID NO: 12820 - RNA, 20 nt, synthetic construct
  source 1..20: mol_type = other RNA
gggaatgtccaaaatttcca

SEQ ID NO: 12821 - RNA, 20 nt, synthetic construct
  source 1..20: mol_type = other RNA
tgggaatgtccaaaatttcc

SEQ ID NO: 12822 - RNA, 20 nt, synthetic construct
  source 1..20: mol_type = other RNA
gacggttgccctggaaattt

SEQ ID NO: 12823 - RNA, 20 nt, synthetic construct
  source 1..20: mol_type = other RNA
accatgaaaattggcgcttt

SEQ ID NO: 12824 - RNA, 20 nt, synthetic construct
  source 1..20: mol_type = other RNA
caccatgaaaattggcgctt

SEQ ID NO: 12825 - RNA, 20 nt, synthetic construct
  source 1..20: mol_type = other RNA
tggatctccaccatgaaaat

SEQ ID NO: 12826 - RNA, 20 nt, synthetic construct
  source 1..20: mol_type = other RNA
tcccaaagcgccaattttca

SEQ ID NO: 12827 - RNA, 20 nt, synthetic construct
  source 1..20: mol_type = other RNA
caaagcgccaattttcatgg

SEQ ID NO: 12828 - RNA, 20 nt, synthetic construct
  source 1..20: mol_type = other RNA
agaagcgaaggggacactgg

SEQ ID NO: 12829 - RNA, 20 nt, synthetic construct
  source 1..20: mol_type = other RNA
tggagaagcgaaggggacac

SEQ ID NO: 12830 - RNA, 20 nt, synthetic construct
  source 1..20: mol_type = other RNA
cagagtttggagaagcgaag

SEQ ID NO: 12831 - RNA, 20 nt, synthetic construct
  source 1..20: mol_type = other RNA
ccagagtttggagaagcgaa

SEQ ID NO: 12832 - RNA, 20 nt, synthetic construct
  source 1..20: mol_type = other RNA
accagagtttggagaagcga

SEQ ID NO: 12833 - RNA, 20 nt, synthetic construct
  source 1..20: mol_type = other RNA
cccttcgcttctccaaactc

SEQ ID NO: 12834 - RNA, 20 nt, synthetic construct
  source 1..20: mol_type = other RNA
accttccagcaaccagagtt

SEQ ID NO: 12835 - RNA, 20 nt, synthetic construct
  source 1..20: mol_type = other RNA
cttctccaaactctggttgc

SEQ ID NO: 12836 - RNA, 20 nt, synthetic construct
  source 1..20: mol_type = other RNA
tccaaactctggttgctgga

SEQ ID NO: 12837 - RNA, 20 nt, synthetic construct
  source 1..20: mol_type = other RNA
gatgcaggttccgtagtggg

SEQ ID NO: 12838 - RNA, 20 nt, synthetic construct
  source 1..20: mol_type = other RNA
gctggaaggtccgcccacta

SEQ ID NO: 12839 - RNA, 20 nt, synthetic construct
  source 1..20: mol_type = other RNA
taggatgcaggttccgtagt

SEQ ID NO: 12840 - RNA, 20 nt, synthetic construct
  source 1..20: mol_type = other RNA
ctaggatgcaggttccgtag

SEQ ID NO: 12841 - RNA, 20 nt, synthetic construct
  source 1..20: mol_type = other RNA
gttccttaactctaggatgc

SEQ ID NO: 12842 - RNA, 20 nt, synthetic construct
  source 1..20: mol_type = other RNA
ttcaggtgttccttaactct

SEQ ID NO: 12843 - RNA, 20 nt, synthetic construct
  source 1..20: mol_type = other RNA
gaacctgcatcctagagtta

SEQ ID NO: 12844 - RNA, 20 nt, synthetic construct
  source 1..20: mol_type = other RNA
acctcggaatctctttattc

SEQ ID NO: 12845 - RNA, 20 nt, synthetic construct
  source 1..20: mol_type = other RNA
acctgaataaagagattccg

SEQ ID NO: 12846 - RNA, 20 nt, synthetic construct
  source 1..20: mol_type = other RNA
gttgaagatctgaactacct

SEQ ID NO: 12847 - RNA, 22 nt, synthetic construct
  source 1..22: mol_type = other RNA
tcccgaccctcccgtcgccgta

SEQ ID NO: 12848 - RNA, 22 nt, synthetic construct
  source 1..22: mol_type = other RNA
ggacgagcctacccgtccccca

SEQ ID NO: 12849 - RNA, 22 nt, synthetic construct
  source 1..22: mol_type = other RNA
acaaacctcagcgccgcgcctt

SEQ ID NO: 12850 - RNA, 22 nt, synthetic construct
  source 1..22: mol_type = other RNA
ctccccacggtgtggccccaca

SEQ ID NO: 12851 - RNA, 22 nt, synthetic construct
  source 1..22: mol_type = other RNA
cctccccacggtgtggccccac

SEQ ID NO: 12852 - RNA, 22 nt, synthetic construct
  source 1..22: mol_type = other RNA
tacaaacgtcgcgtgctgtttc

SEQ ID NO: 12853 - RNA, 22 nt, synthetic construct
  source 1..22: mol_type = other RNA
tatcacagccaagcattctaca

SEQ ID NO: 12854 - RNA, 22 nt, synthetic construct
  source 1..22: mol_type = other RNA
gaaaccgctttgtatcacagcc

SEQ ID NO: 12855 - RNA, 22 nt, synthetic construct
  source 1..22: mol_type = other RNA
ttcgaaaccgctttgtatcaca

SEQ ID NO: 12856 - RNA, 22 nt, synthetic construct
  source 1..22: mol_type = other RNA
attattcgaaaccgctttgtat

SEQ ID NO: 12857 - RNA, 22 nt, synthetic construct
  source 1..22: mol_type = other RNA
aaagtgacatgtgatgggaaca

SEQ ID NO: 12858 - RNA, 22 nt, synthetic construct
  source 1..22: mol_type = other RNA
aaaagtgacatgtgatgggaac

SEQ ID NO: 12859 - RNA, 22 nt, synthetic construct
  source 1..22: mol_type = other RNA
taaaagtgacatgtgatgggaa

SEQ ID NO: 12860 - RNA, 22 nt, synthetic construct
  source 1..22: mol_type = other RNA
ttaaaagtgacatgtgatggga

SEQ ID NO: 12861 - RNA, 22 nt, synthetic construct
  source 1..22: mol_type = other RNA
tttaaaagtgacatgtgatggg

SEQ ID NO: 12862 - RNA, 22 nt, synthetic construct
  source 1..22: mol_type = other RNA
ttataattttttaaaagtgaca

SEQ ID NO: 12863 - RNA, 22 nt, synthetic construct
  source 1..22: mol_type = other RNA
aatgacgcaaagcacataaagt

SEQ ID NO: 12864 - RNA, 22 nt, synthetic construct
  source 1..22: mol_type = other RNA
aaaattaaatgacgcaaagcac

SEQ ID NO: 12865 - RNA, 22 nt, synthetic construct
  source 1..22: mol_type = other RNA
caaaattaaatgacgcaaagca

SEQ ID NO: 12866 - RNA, 22 nt, synthetic construct
  source 1..22: mol_type = other RNA
tcaaaattaaatgacgcaaagc

SEQ ID NO: 12867 - RNA, 22 nt, synthetic construct
  source 1..22: mol_type = other RNA
tctatggcggaagataactgtt

SEQ ID NO: 12868 - RNA, 22 nt, synthetic construct
  source 1..22: mol_type = other RNA
ttcatctgtgagaggcagaaga

SEQ ID NO: 12869 - RNA, 22 nt, synthetic construct
  source 1..22: mol_type = other RNA
cttcatctgtgagaggcagaag

SEQ ID NO: 12870 - RNA, 22 nt, synthetic construct
  source 1..22: mol_type = other RNA
ttaaaatctcggtgccttagtt

SEQ ID NO: 12871 - RNA, 22 nt, synthetic construct
  source 1..22: mol_type = other RNA
cttaaaatctcggtgccttagt

SEQ ID NO: 12872 - RNA, 22 nt, synthetic construct
  source 1..22: mol_type = other RNA
agtttcttaaaatctcggtgcc

SEQ ID NO: 12873 - RNA, 22 nt, synthetic construct
  source 1..22: mol_type = other RNA
tcccctgtgtaattaagtttct

SEQ ID NO: 12874 - RNA, 22 nt, synthetic construct
  source 1..22: mol_type = other RNA
atcccctgtgtaattaagtttc

SEQ ID NO: 12875 - RNA, 22 nt, synthetic construct
  source 1..22: mol_type = other RNA
ctgccatttatcccctgtgtaa

SEQ ID NO: 12876 - RNA, 22 nt, synthetic construct
  source 1..22: mol_type = other RNA
ggcttgacttcaatctcgattg

SEQ ID NO: 12877 - RNA, 22 nt, synthetic construct
  source 1..22: mol_type = other RNA
cagccaaaaggcatgcgctccc

SEQ ID NO: 12878 - RNA, 22 nt, synthetic construct
  source 1..22: mol_type = other RNA
ttaaaaaaaaatgcacgaatta

SEQ ID NO: 12879 - RNA, 22 nt, synthetic construct
  source 1..22: mol_type = other RNA
cttaaaaaaaaatgcacgaatt

SEQ ID NO: 12880 - RNA, 22 nt, synthetic construct
  source 1..22: mol_type = other RNA
tcttaaaaaaaaatgcacgaat

SEQ ID NO: 12881 - RNA, 22 nt, synthetic construct
  source 1..22: mol_type = other RNA
ttcttaaaaaaaaatgcacgaa

SEQ ID NO: 12882 - RNA, 22 nt, synthetic construct
  source 1..22: mol_type = other RNA
ctctggagaatctcacgcagaa

SEQ ID NO: 12883 - RNA, 22 nt, synthetic construct
  source 1..22: mol_type = other RNA
gctctggagaatctcacgcaga

SEQ ID NO: 12884 - RNA, 22 nt, synthetic construct
  source 1..22: mol_type = other RNA
aaaaccgaaagtaagaggcaca

SEQ ID NO: 12885 - RNA, 22 nt, synthetic construct
  source 1..22: mol_type = other RNA
caaaaccgaaagtaagaggcac

SEQ ID NO: 12886 - RNA, 22 nt, synthetic construct
  source 1..22: mol_type = other RNA
tcaaaaccgaaagtaagaggca

SEQ ID NO: 12887 - RNA, 22 nt, synthetic construct
  source 1..22: mol_type = other RNA
caggcgtaagctaccacgccca

SEQ ID NO: 12888 - RNA, 22 nt, synthetic construct
  source 1..22: mol_type = other RNA
gccaggctggtctcaactacgg

SEQ ID NO: 12889 - RNA, 22 nt, synthetic construct
  source 1..22: mol_type = other RNA
tagagaccaggcttcaccatgt

SEQ ID NO: 12890 - RNA, 22 nt, synthetic construct
  source 1..22: mol_type = other RNA
gtagagaccaggcttcaccatg

SEQ ID NO: 12891 - RNA, 22 nt, synthetic construct
  source 1..22: mol_type = other RNA
tgtagagaccaggcttcaccat

SEQ ID NO: 12892 - RNA, 22 nt, synthetic construct
  source 1..22: mol_type = other RNA
ttgtagagaccaggcttcacca

SEQ ID NO: 12893 - RNA, 22 nt, synthetic construct
  source 1..22: mol_type = other RNA
tttgtagagaccaggcttcacc

SEQ ID NO: 12894 - RNA, 22 nt, synthetic construct
  source 1..22: mol_type = other RNA
ttttttgtagagaccaggcttc

SEQ ID NO: 12895 - RNA, 22 nt, synthetic construct
  source 1..22: mol_type = other RNA
ttattttttgtagagaccaggc

SEQ ID NO: 12896 - RNA, 22 nt, synthetic construct
  source 1..22: mol_type = other RNA
ttattattttttgtagagacca

SEQ ID NO: 12897 - RNA, 22 nt, synthetic construct
  source 1..22: mol_type = other RNA
gttattattttttgtagagacc

SEQ ID NO: 12898 - RNA, 22 nt, synthetic construct
  source 1..22: mol_type = other RNA
tgttattattttttgtagagac

SEQ ID NO: 12899 - RNA, 22 nt, synthetic construct
  source 1..22: mol_type = other RNA
ttgttattattttttgtagaga

SEQ ID NO: 12900 - RNA, 22 nt, synthetic construct
  source 1..22: mol_type = other RNA
cccacgctggagtgcactggcg

SEQ ID NO: 12901 - RNA, 22 nt, synthetic construct
  source 1..22: mol_type = other RNA
agagacagggtctcgctctgtt

SEQ ID NO: 12902 - RNA, 22 nt, synthetic construct
  source 1..22: mol_type = other RNA
gagagacagggtctcgctctgt

SEQ ID NO: 12903 - RNA, 22 nt, synthetic construct
  source 1..22: mol_type = other RNA
tgagagacagggtctcgctctg

SEQ ID NO: 12904 - RNA, 22 nt, synthetic construct
  source 1..22: mol_type = other RNA
ttgagagacagggtctcgctct

SEQ ID NO: 12905 - RNA, 22 nt, synthetic construct
  source 1..22: mol_type = other RNA
ttttttgagagacagggtctcg

SEQ ID NO: 12906 - RNA, 22 nt, synthetic construct
  source 1..22: mol_type = other RNA
cttttttgagagacagggtctc

SEQ ID NO: 12907 - RNA, 22 nt, synthetic construct
  source 1..22: mol_type = other RNA
tcttttttgagagacagggtct

SEQ ID NO: 12908 - RNA, 22 nt, synthetic construct
  source 1..22: mol_type = other RNA
ttcttttttgagagacagggtc

SEQ ID NO: 12909 - RNA, 22 nt, synthetic construct
  source 1..22: mol_type = other RNA
tttcttttttgagagacagggt

SEQ ID NO: 12910 - RNA, 22 nt, synthetic construct
  source 1..22: mol_type = other RNA
ttttcttttttgagagacaggg

SEQ ID NO: 12911 - RNA, 22 nt, synthetic construct
  source 1..22: mol_type = other RNA
tttttcttttttgagagacagg

SEQ ID NO: 12912 - RNA, 22 nt, synthetic construct
  source 1..22: mol_type = other RNA
ttttttcttttttgagagacag

SEQ ID NO: 12913 - RNA, 22 nt, synthetic construct
  source 1..22: mol_type = other RNA
tttttttcttttttgagagaca

SEQ ID NO: 12914 - RNA, 22 nt, synthetic construct
  source 1..22: mol_type = other RNA
ttttttttcttttttgagagac

SEQ ID NO: 12915 - RNA, 22 nt, synthetic construct
  source 1..22: mol_type = other RNA
tttttttttcttttttgagaga

SEQ ID NO: 12916 - RNA, 22 nt, synthetic construct
  source 1..22: mol_type = other RNA
ttttttttttcttttttgagag

SEQ ID NO: 12917 - RNA, 22 nt, synthetic construct
  source 1..22: mol_type = other RNA
tttttttttttcttttttgaga

SEQ ID NO: 12918 - RNA, 22 nt, synthetic construct
  source 1..22: mol_type = other RNA
tttcttttcttttctctttctt

SEQ ID NO: 12919 - RNA, 22 nt, synthetic construct
  source 1..22: mol_type = other RNA
cagctcccctgactgacaaacc

SEQ ID NO: 12920 - RNA, 22 nt, synthetic construct
  source 1..22: mol_type = other RNA
acagctcccctgactgacaaac

SEQ ID NO: 12921 - RNA, 22 nt, synthetic construct
  source 1..22: mol_type = other RNA
tacagctcccctgactgacaaa

SEQ ID NO: 12922 - RNA, 22 nt, synthetic construct
  source 1..22: mol_type = other RNA
atggttttacagctcccctgac

SEQ ID NO: 12923 - RNA, 22 nt, synthetic construct
  source 1..22: mol_type = other RNA
ttaatggttttacagctcccct

SEQ ID NO: 12924 - RNA, 22 nt, synthetic construct
  source 1..22: mol_type = other RNA
tctttattaatggttttacagc

SEQ ID NO: 12925 - RNA, 22 nt, synthetic construct
  source 1..22: mol_type = other RNA
ccaggtacttagaaagtgctca

SEQ ID NO: 12926 - RNA, 22 nt, synthetic construct
  source 1..22: mol_type = other RNA
ccagaggaaaaggtgagcgcgc

SEQ ID NO: 12927 - RNA, 22 nt, synthetic construct
  source 1..22: mol_type = other RNA
gccagaggaaaaggtgagcgcg

SEQ ID NO: 12928 - RNA, 22 nt, synthetic construct
  source 1..22: mol_type = other RNA
tgccagaggaaaaggtgagcgc

SEQ ID NO: 12929 - RNA, 22 nt, synthetic construct
  source 1..22: mol_type = other RNA
gatcatgttttgccagaggaaa

SEQ ID NO: 12930 - RNA, 22 nt, synthetic construct
  source 1..22: mol_type = other RNA
tgctttcgatcatgttttgcca

SEQ ID NO: 12931 - RNA, 22 nt, synthetic construct
  source 1..22: mol_type = other RNA
tcatgatcaaaacattctgctt

SEQ ID NO: 12932 - RNA, 22 nt, synthetic construct
  source 1..22: mol_type = other RNA
ctcatgatcaaaacattctgct

SEQ ID NO: 12933 - RNA, 22 nt, synthetic construct
  source 1..22: mol_type = other RNA
tctcatgatcaaaacattctgc

SEQ ID NO: 12934 - RNA, 22 nt, synthetic construct
  source 1..22: mol_type = other RNA
aatgcaattttctcatgatcaa

SEQ ID NO: 12935 - RNA, 22 nt, synthetic construct
  source 1..22: mol_type = other RNA
aaattaaatgcaattttctcat

SEQ ID NO: 12936 - RNA, 22 nt, synthetic construct
  source 1..22: mol_type = other RNA
tattcaaattaaatgcaatttt

SEQ ID NO: 12937 - RNA, 22 nt, synthetic construct
  source 1..22: mol_type = other RNA
taaataaattgtattcaaatta

SEQ ID NO: 12938 - RNA, 22 nt, synthetic construct
  source 1..22: mol_type = other RNA
tgttgtaaataaattgtattca

SEQ ID NO: 12939 - RNA, 22 nt, synthetic construct
  source 1..22: mol_type = other RNA
tcctttatgttgtaaataaatt

SEQ ID NO: 12940 - RNA, 22 nt, synthetic construct
  source 1..22: mol_type = other RNA
aaatgacatctaacataaccag

SEQ ID NO: 12941 - RNA, 22 nt, synthetic construct
  source 1..22: mol_type = other RNA
aaaatgacatctaacataacca

SEQ ID NO: 12942 - RNA, 22 nt, synthetic construct
  source 1..22: mol_type = other RNA
taaaatgacatctaacataacc

SEQ ID NO: 12943 - RNA, 22 nt, synthetic construct
  source 1..22: mol_type = other RNA
ttaaaatgacatctaacataac

SEQ ID NO: 12944 - RNA, 22 nt, synthetic construct
  source 1..22: mol_type = other RNA
tttaaaatgacatctaacataa

SEQ ID NO: 12945 - RNA, 22 nt, synthetic construct
  source 1..22: mol_type = other RNA
ttttttaaaatgacatctaaca

SEQ ID NO: 12946 - RNA, 22 nt, synthetic construct
  source 1..22: mol_type = other RNA
ttattttttaaaatgacatcta

SEQ ID NO: 12947 - RNA, 22 nt, synthetic construct
  source 1..22: mol_type = other RNA
aatatcagattgttatttttta

SEQ ID NO: 12948 - RNA, 22 nt, synthetic construct
  source 1..22: mol_type = other RNA
aaatatcagattgttatttttt

SEQ ID NO: 12949 - RNA, 22 nt, synthetic construct
  source 1..22: mol_type = other RNA
taaatatcagattgttattttt

SEQ ID NO: 12950 - RNA, 22 nt, synthetic construct
  source 1..22: mol_type = other RNA
ttaaatatcagattgttatttt

SEQ ID NO: 12951 - RNA, 22 nt, synthetic construct
  source 1..22: mol_type = other RNA
tttaaatatcagattgttattt

SEQ ID NO: 12952 - RNA, 22 nt, synthetic construct
  source 1..22: mol_type = other RNA
ttttaaatatcagattgttatt

SEQ ID NO: 12953 - RNA, 22 nt, synthetic construct
  source 1..22: mol_type = other RNA
tttttaaatatcagattgttat

SEQ ID NO: 12954 - RNA, 22 nt, synthetic construct
  source 1..22: mol_type = other RNA
ttttttaaatatcagattgtta

SEQ ID NO: 12955 - RNA, 22 nt, synthetic construct
  source 1..22: mol_type = other RNA
aaaataagatttttttttaaat

SEQ ID NO: 12956 - RNA, 22 nt, synthetic construct
  source 1..22: mol_type = other RNA
caaaataagatttttttttaaa

SEQ ID NO: 12957 - RNA, 22 nt, synthetic construct
  source 1..22: mol_type = other RNA
tcaaaataagatttttttttaa

SEQ ID NO: 12958 - RNA, 22 nt, synthetic construct
  source 1..22: mol_type = other RNA
gaaattttcaaaataagatttt

SEQ ID NO: 12959 - RNA, 22 nt, synthetic construct
  source 1..22: mol_type = other RNA
ctttggaaattttcaaaataag

SEQ ID NO: 12960 - RNA, 22 nt, synthetic construct
  source 1..22: mol_type = other RNA
ttgtggtatcttccagaaatgg

SEQ ID NO: 12961 - RNA, 22 nt, synthetic construct
  source 1..22: mol_type = other RNA
cttgtggtatcttccagaaatg

SEQ ID NO: 12962 - RNA, 22 nt, synthetic construct
  source 1..22: mol_type = other RNA
catgtttcttgtggtatcttcc

SEQ ID NO: 12963 - RNA, 22 nt, synthetic construct
  source 1..22: mol_type = other RNA
tgcccacagtaaaacaaaaaca

SEQ ID NO: 12964 - RNA, 22 nt, synthetic construct
  source 1..22: mol_type = other RNA
atgcccacagtaaaacaaaaac

SEQ ID NO: 12965 - RNA, 22 nt, synthetic construct
  source 1..22: mol_type = other RNA
atttatgcccacagtaaaacaa

SEQ ID NO: 12966 - RNA, 22 nt, synthetic construct
  source 1..22: mol_type = other RNA
agcttccaaaacttaactgaaa

SEQ ID NO: 12967 - RNA, 22 nt, synthetic construct
  source 1..22: mol_type = other RNA
aagcttccaaaacttaactgaa

SEQ ID NO: 12968 - RNA, 22 nt, synthetic construct
  source 1..22: mol_type = other RNA
tttaagcttccaaaacttaact

SEQ ID NO: 12969 - RNA, 22 nt, synthetic construct
  source 1..22: mol_type = other RNA
gagagttatttaagcttccaaa

SEQ ID NO: 12970 - RNA, 22 nt, synthetic construct
  source 1..22: mol_type = other RNA
ggagagttatttaagcttccaa

SEQ ID NO: 12971 - RNA, 22 nt, synthetic construct
  source 1..22: mol_type = other RNA
tgacttttggagagttatttaa

SEQ ID NO: 12972 - RNA, 22 nt, synthetic construct
  source 1..22: mol_type = other RNA
ctggctttatgacttttggaga

SEQ ID NO: 12973 - RNA, 22 nt, synthetic construct
  source 1..22: mol_type = other RNA
ggctcaaccagttactggcttt

SEQ ID NO: 12974 - RNA, 22 nt, synthetic construct
  source 1..22: mol_type = other RNA
gggctcaaccagttactggctt

SEQ ID NO: 12975 - RNA, 22 nt, synthetic construct
  source 1..22: mol_type = other RNA
aatttgggctcaaccagttact

SEQ ID NO: 12976 - RNA, 22 nt, synthetic construct
  source 1..22: mol_type = other RNA
gaatttgggctcaaccagttac

SEQ ID NO: 12977 - RNA, 22 nt, synthetic construct
  source 1..22: mol_type = other RNA
taagaagaggacaagtatcaga

SEQ ID NO: 12978 - RNA, 22 nt, synthetic construct
  source 1..22: mol_type = other RNA
ctaagaagaggacaagtatcag

SEQ ID NO: 12979 - RNA, 22 nt, synthetic construct
  source 1..22: mol_type = other RNA
tgagagcatcactgtaatcttt

SEQ ID NO: 12980 - RNA, 22 nt, synthetic construct
  source 1..22: mol_type = other RNA
gtgagagcatcactgtaatctt

SEQ ID NO: 12981 - RNA, 22 nt, synthetic construct
  source 1..22: mol_type = other RNA
tgtgagagcatcactgtaatct

SEQ ID NO: 12982 - RNA, 22 nt, synthetic construct
  source 1..22: mol_type = other RNA
agggaaggcggcaagattttgt

SEQ ID NO: 12983 - RNA, 22 nt, synthetic construct
  source 1..22: mol_type = other RNA
gagggaaggcggcaagattttg

SEQ ID NO: 12984 - RNA, 22 nt, synthetic construct
  source 1..22: mol_type = other RNA
atcctgcctggaactctctgtt

SEQ ID NO: 12985 - RNA, 22 nt, synthetic construct
  source 1..22: mol_type = other RNA
aatgcctcagggatcagagcac

SEQ ID NO: 12986 - RNA, 22 nt, synthetic construct
  source 1..22: mol_type = other RNA
catctgagcttctaataataag

SEQ ID NO: 12987 - RNA, 22 nt, synthetic construct
  source 1..22: mol_type = other RNA
aaagctaagagagctctttgca

SEQ ID NO: 12988 - RNA, 22 nt, synthetic construct
  source 1..22: mol_type = other RNA
ataacattaaaagctaagagag

SEQ ID NO: 12989 - RNA, 22 nt, synthetic construct
  source 1..22: mol_type = other RNA
cataacattaaaagctaagaga

SEQ ID NO: 12990 - RNA, 22 nt, synthetic construct
  source 1..22: mol_type = other RNA
tcataacattaaaagctaagag

SEQ ID NO: 12991 - RNA, 22 nt, synthetic construct
  source 1..22: mol_type = other RNA
ttcataacattaaaagctaaga

SEQ ID NO: 12992 - RNA, 22 nt, synthetic construct
  source 1..22: mol_type = other RNA
tttcataacattaaaagctaag

SEQ ID NO: 12993 - RNA, 22 nt, synthetic construct
  source 1..22: mol_type = other RNA
ttttcataacattaaaagctaa

SEQ ID NO: 12994 - RNA, 22 nt, synthetic construct
  source 1..22: mol_type = other RNA
gggaatctaatgaagacctgat

SEQ ID NO: 12995 - RNA, 22 nt, synthetic construct
  source 1..22: mol_type = other RNA
aggaaaggctactagccccatc

SEQ ID NO: 12996 - RNA, 22 nt, synthetic construct
  source 1..22: mol_type = other RNA
agggtacatgatcactaaaagg

SEQ ID NO: 12997 - RNA, 22 nt, synthetic construct
  source 1..22: mol_type = other RNA
aatacacttatattcagggtac

SEQ ID NO: 12998 - RNA, 22 nt, synthetic construct
  source 1..22: mol_type = other RNA
aaatacacttatattcagggta

SEQ ID NO: 12999 - RNA, 22 nt, synthetic construct
  source 1..22: mol_type = other RNA
ttttaaatacacttatattcag

SEQ ID NO: 13000 - RNA, 22 nt, synthetic construct
  source 1..22: mol_type = other RNA
acactaaatatatgtgtataaa

SEQ ID NO: 13001 - RNA, 22 nt, synthetic construct
  source 1..22: mol_type = other RNA
gtgctactaaatatacagattg

SEQ ID NO: 13002 - RNA, 22 nt, synthetic construct
  source 1..22: mol_type = other RNA
aaaatgaagagaagtgttagtg

SEQ ID NO: 13003 - RNA, 22 nt, synthetic construct
  source 1..22: mol_type = other RNA
attgaaaatgaagagaagtgtt

SEQ ID NO: 13004 - RNA, 22 nt, synthetic construct
  source 1..22: mol_type = other RNA
cattgaaaatgaagagaagtgt

SEQ ID NO: 13005 - RNA, 22 nt, synthetic construct
  source 1..22: mol_type = other RNA
tcattgaaaatgaagagaagtg

SEQ ID NO: 13006 - RNA, 22 nt, synthetic construct
  source 1..22: mol_type = other RNA
ttcattgaaaatgaagagaagt

SEQ ID NO: 13007 - RNA, 22 nt, synthetic construct
  source 1..22: mol_type = other RNA
taaactctatatttttcattga

SEQ ID NO: 13008 - RNA, 22 nt, synthetic construct
  source 1..22: mol_type = other RNA
caaaatgagaggcatgactaga

SEQ ID NO: 13009 - RNA, 22 nt, synthetic construct
  source 1..22: mol_type = other RNA
agaaacagtactttccaaaatg

SEQ ID NO: 13010 - RNA, 22 nt, synthetic construct
  source 1..22: mol_type = other RNA
cagaaacagtactttccaaaat

SEQ ID NO: 13011 - RNA, 22 nt, synthetic construct
  source 1..22: mol_type = other RNA
cctaatgtttcagaaacagtac

SEQ ID NO: 13012 - RNA, 22 nt, synthetic construct
  source 1..22: mol_type = other RNA
ggaatatattgcctaatgtttc

SEQ ID NO: 13013 - RNA, 22 nt, synthetic construct
  source 1..22: mol_type = other RNA
ctgtaaactagccaggttggga

SEQ ID NO: 13014 - RNA, 22 nt, synthetic construct
  source 1..22: mol_type = other RNA
gcatccacaggtgattgctgta

SEQ ID NO: 13015 - RNA, 22 nt, synthetic construct
  source 1..22: mol_type = other RNA
attagcatccacaggtgattgc

SEQ ID NO: 13016 - RNA, 22 nt, synthetic construct
  source 1..22: mol_type = other RNA
aattagcatccacaggtgattg

SEQ ID NO: 13017 - RNA, 22 nt, synthetic construct
  source 1..22: mol_type = other RNA
taattagcatccacaggtgatt

SEQ ID NO: 13018 - RNA, 22 nt, synthetic construct
  source 1..22: mol_type = other RNA
cgttttaattagcatccacagg

SEQ ID NO: 13019 - RNA, 22 nt, synthetic construct
  source 1..22: mol_type = other RNA
gcgttttaattagcatccacag

SEQ ID NO: 13020 - RNA, 22 nt, synthetic construct
  source 1..22: mol_type = other RNA
tgatcaaatggagtaatgcatg

SEQ ID NO: 13021 - RNA, 22 nt, synthetic construct
  source 1..22: mol_type = other RNA
cattatgatcaaatggagtaat

SEQ ID NO: 13022 - RNA, 22 nt, synthetic construct
  source 1..22: mol_type = other RNA
gacccgataaaatacaacaggg

SEQ ID NO: 13023 - RNA, 22 nt, synthetic construct
  source 1..22: mol_type = other RNA
agttggacccgataaaatacaa

SEQ ID NO: 13024 - RNA, 22 nt, synthetic construct
  source 1..22: mol_type = other RNA
atgagctaaaaaacaaagaaac

SEQ ID NO: 13025 - RNA, 22 nt, synthetic construct
  source 1..22: mol_type = other RNA
catgagctaaaaaacaaagaaa

SEQ ID NO: 13026 - RNA, 22 nt, synthetic construct
  source 1..22: mol_type = other RNA
tacctaatttcatgagctaaaa

SEQ ID NO: 13027 - RNA, 22 nt, synthetic construct
  source 1..22: mol_type = other RNA
tatgccagacccctctctgact

SEQ ID NO: 13028 - RNA, 22 nt, synthetic construct
  source 1..22: mol_type = other RNA
atatgccagacccctctctgac

SEQ ID NO: 13029 - RNA, 22 nt, synthetic construct
  source 1..22: mol_type = other RNA
tatatgccagacccctctctga

SEQ ID NO: 13030 - RNA, 22 nt, synthetic construct
  source 1..22: mol_type = other RNA
tgctgaggttttatatgccaga

SEQ ID NO: 13031 - RNA, 22 nt, synthetic construct
  source 1..22: mol_type = other RNA
ctgctgaggttttatatgccag

SEQ ID NO: 13032 - RNA, 22 nt, synthetic construct
  source 1..22: mol_type = other RNA
tttctgctgaggttttatatgc

SEQ ID NO: 13033 - RNA, 22 nt, synthetic construct
  source 1..22: mol_type = other RNA
ttaccaaacaacaaaacctctt

SEQ ID NO: 13034 - RNA, 22 nt, synthetic construct
  source 1..22: mol_type = other RNA
caggcacgagccaccgtgccca

SEQ ID NO: 13035 - RNA, 22 nt, synthetic construct
  source 1..22: mol_type = other RNA
ggattacaggcacgagccaccg

SEQ ID NO: 13036 - RNA, 22 nt, synthetic construct
  source 1..22: mol_type = other RNA
gccaggctggtcttgaactccc

SEQ ID NO: 13037 - RNA, 22 nt, synthetic construct
  source 1..22: mol_type = other RNA
accatgttggccaggctggtct

SEQ ID NO: 13038 - RNA, 22 nt, synthetic construct
  source 1..22: mol_type = other RNA
caccatgttggccaggctggtc

SEQ ID NO: 13039 - RNA, 22 nt, synthetic construct
  source 1..22: mol_type = other RNA
agtagagacgggatttcaccat

SEQ ID NO: 13040 - RNA, 22 nt, synthetic construct
  source 1..22: mol_type = other RNA
cagtagagacgggatttcacca

SEQ ID NO: 13041 - RNA, 22 nt, synthetic construct
  source 1..22: mol_type = other RNA
tcagtagagacgggatttcacc

SEQ ID NO: 13042 - RNA, 22 nt, synthetic construct
  source 1..22: mol_type = other RNA
tattttcagtagagacgggatt

SEQ ID NO: 13043 - RNA, 22 nt, synthetic construct
  source 1..22: mol_type = other RNA
gtattttcagtagagacgggat

SEQ ID NO: 13044 - RNA, 22 nt, synthetic construct
  source 1..22: mol_type = other RNA
tgtattttcagtagagacggga

SEQ ID NO: 13045 - RNA, 22 nt, synthetic construct
  source 1..22: mol_type = other RNA
ttgtattttcagtagagacggg

SEQ ID NO: 13046 - RNA, 22 nt, synthetic construct
  source 1..22: mol_type = other RNA
atttttgtattttcagtagaga

SEQ ID NO: 13047 - RNA, 22 nt, synthetic construct
  source 1..22: mol_type = other RNA
ctgggactacaggcacacacca

SEQ ID NO: 13048 - RNA, 22 nt, synthetic construct
  source 1..22: mol_type = other RNA
aagtgattcctgggactacagg

SEQ ID NO: 13049 - RNA, 22 nt, synthetic construct
  source 1..22: mol_type = other RNA
cccaggctggagtgcagtgtgc

SEQ ID NO: 13050 - RNA, 22 nt, synthetic construct
  source 1..22: mol_type = other RNA
cattgcccaggctggagtgcag

SEQ ID NO: 13051 - RNA, 22 nt, synthetic construct
  source 1..22: mol_type = other RNA
ggatggaatctcattccattgc

SEQ ID NO: 13052 - RNA, 22 nt, synthetic construct
  source 1..22: mol_type = other RNA
gggatggaatctcattccattg

SEQ ID NO: 13053 - RNA, 22 nt, synthetic construct
  source 1..22: mol_type = other RNA
tgggatggaatctcattccatt

SEQ ID NO: 13054 - RNA, 22 nt, synthetic construct
  source 1..22: mol_type = other RNA
ttgggatggaatctcattccat

SEQ ID NO: 13055 - RNA, 22 nt, synthetic construct
  source 1..22: mol_type = other RNA
tttgggatggaatctcattcca

SEQ ID NO: 13056 - RNA, 22 nt, synthetic construct
  source 1..22: mol_type = other RNA
ttttttgggatggaatctcatt

SEQ ID NO: 13057 - RNA, 22 nt, synthetic construct
  source 1..22: mol_type = other RNA
attttttgggatggaatctcat

SEQ ID NO: 13058 - RNA, 22 nt, synthetic construct
  source 1..22: mol_type = other RNA
tattttttgggatggaatctca

SEQ ID NO: 13059 - RNA, 22 nt, synthetic construct
  source 1..22: mol_type = other RNA
ttattttttgggatggaatctc

SEQ ID NO: 13060 - RNA, 22 nt, synthetic construct
  source 1..22: mol_type = other RNA
tttattttttgggatggaatct

SEQ ID NO: 13061 - RNA, 22 nt, synthetic construct
  source 1..22: mol_type = other RNA
ttttattttttgggatggaatc

SEQ ID NO: 13062 - RNA, 22 nt, synthetic construct
  source 1..22: mol_type = other RNA
tttttttattttttgggatgga

SEQ ID NO: 13063 - RNA, 22 nt, synthetic construct
  source 1..22: mol_type = other RNA
atttttttattttttgggatgg

SEQ ID NO: 13064 - RNA, 22 nt, synthetic construct
  source 1..22: mol_type = other RNA
tatttttttattttttgggatg

SEQ ID NO: 13065 - RNA, 22 nt, synthetic construct
  source 1..22: mol_type = other RNA
ttatttttttattttttgggat

SEQ ID NO: 13066 - RNA, 22 nt, synthetic construct
  source 1..22: mol_type = other RNA
tttatttttttattttttggga

SEQ ID NO: 13067 - RNA, 22 nt, synthetic construct
  source 1..22: mol_type = other RNA
ttttatttttttattttttggg

SEQ ID NO: 13068 - RNA, 22 nt, synthetic construct
  source 1..22: mol_type = other RNA
ctaagtggatcaacccaaggta

SEQ ID NO: 13069 - RNA, 22 nt, synthetic construct
  source 1..22: mol_type = other RNA
tctgaggttcctaagtggatca

SEQ ID NO: 13070 - RNA, 22 nt, synthetic construct
  source 1..22: mol_type = other RNA
ttatctgaggttcctaagtgga

SEQ ID NO: 13071 - RNA, 22 nt, synthetic construct
  source 1..22: mol_type = other RNA
ctctatacgtggcagatgttat

SEQ ID NO: 13072 - RNA, 22 nt, synthetic construct
  source 1..22: mol_type = other RNA
taaactgtatgaagtgtctagt

SEQ ID NO: 13073 - RNA, 22 nt, synthetic construct
  source 1..22: mol_type = other RNA
ctaaactgtatgaagtgtctag

SEQ ID NO: 13074 - RNA, 22 nt, synthetic construct
  source 1..22: mol_type = other RNA
tctaaactgtatgaagtgtcta

SEQ ID NO: 13075 - RNA, 22 nt, synthetic construct
  source 1..22: mol_type = other RNA
ctgctcctgccttgatctacac

SEQ ID NO: 13076 - RNA, 22 nt, synthetic construct
  source 1..22: mol_type = other RNA
gttcctgctcctgccttgatct

SEQ ID NO: 13077 - RNA, 22 nt, synthetic construct
  source 1..22: mol_type = other RNA
ggttcctgctcctgccttgatc

SEQ ID NO: 13078 - RNA, 22 nt, synthetic construct
  source 1..22: mol_type = other RNA
tggttcctgctcctgccttgat

SEQ ID NO: 13079 - RNA, 22 nt, synthetic construct
  source 1..22: mol_type = other RNA
tttttggttcctgctcctgcct

SEQ ID NO: 13080 - RNA, 22 nt, synthetic construct
  source 1..22: mol_type = other RNA
tgcctttctttttggttcctgc

SEQ ID NO: 13081 - RNA, 22 nt, synthetic construct
  source 1..22: mol_type = other RNA
atgcctttctttttggttcctg

SEQ ID NO: 13082 - RNA, 22 nt, synthetic construct
  source 1..22: mol_type = other RNA
ttatgtttatgcctttcttttt

SEQ ID NO: 13083 - RNA, 22 nt, synthetic construct
  source 1..22: mol_type = other RNA
cttatgtttatgcctttctttt

SEQ ID NO: 13084 - RNA, 22 nt, synthetic construct
  source 1..22: mol_type = other RNA
tcttatgtttatgcctttcttt

SEQ ID NO: 13085 - RNA, 22 nt, synthetic construct
  source 1..22: mol_type = other RNA
ttcttatgtttatgcctttctt

SEQ ID NO: 13086 - RNA, 22 nt, synthetic construct
  source 1..22: mol_type = other RNA
tttcttatgtttatgcctttct

SEQ ID NO: 13087 - RNA, 22 nt, synthetic construct
  source 1..22: mol_type = other RNA
ttttcttatgtttatgcctttc

SEQ ID NO: 13088 - RNA, 22 nt, synthetic construct
  source 1..22: mol_type = other RNA
tttttcttatgtttatgccttt

SEQ ID NO: 13089 - RNA, 22 nt, synthetic construct
  source 1..22: mol_type = other RNA
caccccttccattttttttctt

SEQ ID NO: 13090 - RNA, 22 nt, synthetic construct
  source 1..22: mol_type = other RNA
ccaccccttccattttttttct

SEQ ID NO: 13091 - RNA, 22 nt, synthetic construct
  source 1..22: mol_type = other RNA
tactctgtttccaccccttcca

SEQ ID NO: 13092 - RNA, 22 nt, synthetic construct
  source 1..22: mol_type = other RNA
ttgtactctgtttccacccctt

SEQ ID NO: 13093 - RNA, 22 nt, synthetic construct
  source 1..22: mol_type = other RNA
ctcatgttattgtactctgttt

SEQ ID NO: 13094 - RNA, 22 nt, synthetic construct
  source 1..22: mol_type = other RNA
ataatagcccccatcaaattac

SEQ ID NO: 13095 - RNA, 22 nt, synthetic construct
  source 1..22: mol_type = other RNA
tcagttcataatagcccccatc

SEQ ID NO: 13096 - RNA, 22 nt, synthetic construct
  source 1..22: mol_type = other RNA
ctcagttcataatagcccccat

SEQ ID NO: 13097 - RNA, 22 nt, synthetic construct
  source 1..22: mol_type = other RNA
atttctcagttcataatagccc

SEQ ID NO: 13098 - RNA, 22 nt, synthetic construct
  source 1..22: mol_type = other RNA
aaagttcatttctcagttcata

SEQ ID NO: 13099 - RNA, 22 nt, synthetic construct
  source 1..22: mol_type = other RNA
caaagttcatttctcagttcat

SEQ ID NO: 13100 - RNA, 22 nt, synthetic construct
  source 1..22: mol_type = other RNA
gccccaagatacttttcaaagt

SEQ ID NO: 13101 - RNA, 22 nt, synthetic construct
  source 1..22: mol_type = other RNA
ggccccaagatacttttcaaag

SEQ ID NO: 13102 - RNA, 22 nt, synthetic construct
  source 1..22: mol_type = other RNA
cttaacacatcactcaagagtc

SEQ ID NO: 13103 - RNA, 22 nt, synthetic construct
  source 1..22: mol_type = other RNA
tctggaggctctcaaggacttc

SEQ ID NO: 13104 - RNA, 22 nt, synthetic construct
  source 1..22: mol_type = other RNA
agagcctttctctggaggctct

SEQ ID NO: 13105 - RNA, 22 nt, synthetic construct
  source 1..22: mol_type = other RNA
aagagcctttctctggaggctc

SEQ ID NO: 13106 - RNA, 22 nt, synthetic construct
  source 1..22: mol_type = other RNA
taagagcctttctctggaggct

SEQ ID NO: 13107 - RNA, 22 nt, synthetic construct
  source 1..22: mol_type = other RNA
ttaagagcctttctctggaggc

SEQ ID NO: 13108 - RNA, 22 nt, synthetic construct
  source 1..22: mol_type = other RNA
cgctgcatttttaagagccttt

SEQ ID NO: 13109 - RNA, 22 nt, synthetic construct
  source 1..22: mol_type = other RNA
tagcagtatcttctgtcactgg

SEQ ID NO: 13110 - RNA, 22 nt, synthetic construct
  source 1..22: mol_type = other RNA
ctagcagtatcttctgtcactg

SEQ ID NO: 13111 - RNA, 22 nt, synthetic construct
  source 1..22: mol_type = other RNA
tagcagatttctagcagtatct

SEQ ID NO: 13112 - RNA, 22 nt, synthetic construct
  source 1..22: mol_type = other RNA
ctagcagatttctagcagtatc

SEQ ID NO: 13113 - RNA, 22 nt, synthetic construct
  source 1..22: mol_type = other RNA
tctagcagatttctagcagtat

SEQ ID NO: 13114 - RNA, 22 nt, synthetic construct
  source 1..22: mol_type = other RNA
ttctagcagatttctagcagta

SEQ ID NO: 13115 - RNA, 22 nt, synthetic construct
  source 1..22: mol_type = other RNA
tttctagcagatttctagcagt

SEQ ID NO: 13116 - RNA, 22 nt, synthetic construct
  source 1..22: mol_type = other RNA
ttttctagcagatttctagcag

SEQ ID NO: 13117 - RNA, 22 nt, synthetic construct
  source 1..22: mol_type = other RNA
tttttctagcagatttctagca

SEQ ID NO: 13118 - RNA, 22 nt, synthetic construct
  source 1..22: mol_type = other RNA
ttttttttctagcagatttcta

SEQ ID NO: 13119 - RNA, 22 nt, synthetic construct
  source 1..22: mol_type = other RNA
gttttttttctagcagatttct

SEQ ID NO: 13120 - RNA, 22 nt, synthetic construct
  source 1..22: mol_type = other RNA
tgttttttttctagcagatttc

SEQ ID NO: 13121 - RNA, 22 nt, synthetic construct
  source 1..22: mol_type = other RNA
ttgttttttttctagcagattt

SEQ ID NO: 13122 - RNA, 22 nt, synthetic construct
  source 1..22: mol_type = other RNA
ctctatacatgccttttttgtt

SEQ ID NO: 13123 - RNA, 22 nt, synthetic construct
  source 1..22: mol_type = other RNA
cctcataattcctctatacatg

SEQ ID NO: 13124 - RNA, 22 nt, synthetic construct
  source 1..22: mol_type = other RNA
aagaataaaccgtgacttggta

SEQ ID NO: 13125 - RNA, 22 nt, synthetic construct
  source 1..22: mol_type = other RNA
gaagaataaaccgtgacttggt

SEQ ID NO: 13126 - RNA, 22 nt, synthetic construct
  source 1..22: mol_type = other RNA
tgaagaataaaccgtgacttgg

SEQ ID NO: 13127 - RNA, 22 nt, synthetic construct
  source 1..22: mol_type = other RNA
cactctggccaaatgagcttcc

SEQ ID NO: 13128 - RNA, 22 nt, synthetic construct
  source 1..22: mol_type = other RNA
ccactctggccaaatgagcttc

SEQ ID NO: 13129 - RNA, 22 nt, synthetic construct
  source 1..22: mol_type = other RNA
catttccactctggccaaatga

SEQ ID NO: 13130 - RNA, 22 nt, synthetic construct
  source 1..22: mol_type = other RNA
tcccaattccatttccactctg

SEQ ID NO: 13131 - RNA, 22 nt, synthetic construct
  source 1..22: mol_type = other RNA
ctcccaattccatttccactct

SEQ ID NO: 13132 - RNA, 22 nt, synthetic construct
  source 1..22: mol_type = other RNA
gtcatcgatttctcccaattcc

SEQ ID NO: 13133 - RNA, 22 nt, synthetic construct
  source 1..22: mol_type = other RNA
ggtcatcgatttctcccaattc

SEQ ID NO: 13134 - RNA, 22 nt, synthetic construct
  source 1..22: mol_type = other RNA
catttggtcatcgatttctccc

SEQ ID NO: 13135 - RNA, 22 nt, synthetic construct
  source 1..22: mol_type = other RNA
acatttggtcatcgatttctcc

SEQ ID NO: 13136 - RNA, 22 nt, synthetic construct
  source 1..22: mol_type = other RNA
acttggggctaacttggtgtca

SEQ ID NO: 13137 - RNA, 22 nt, synthetic construct
  source 1..22: mol_type = other RNA
cacttggggctaacttggtgtc

SEQ ID NO: 13138 - RNA, 22 nt, synthetic construct
  source 1..22: mol_type = other RNA
ccagggtatttcacttggggct

SEQ ID NO: 13139 - RNA, 22 nt, synthetic construct
  source 1..22: mol_type = other RNA
atattgccagggtatttcactt

SEQ ID NO: 13140 - RNA, 22 nt, synthetic construct
  source 1..22: mol_type = other RNA
gagtacctgaggaatatcggga

SEQ ID NO: 13141 - RNA, 22 nt, synthetic construct
  source 1..22: mol_type = other RNA
tctgctggatgacgtgagtaaa

SEQ ID NO: 13142 - RNA, 22 nt, synthetic construct
  source 1..22: mol_type = other RNA
cattctctgctggatgacgtga

SEQ ID NO: 13143 - RNA, 22 nt, synthetic construct
  source 1..22: mol_type = other RNA
actttccattctctgctggatg

SEQ ID NO: 13144 - RNA, 22 nt, synthetic construct
  source 1..22: mol_type = other RNA
gactttccattctctgctggat

SEQ ID NO: 13145 - RNA, 22 nt, synthetic construct
  source 1..22: mol_type = other RNA
aggaaatttgactttccattct

SEQ ID NO: 13146 - RNA, 22 nt, synthetic construct
  source 1..22: mol_type = other RNA
ttcagtaagtcaacttcaatgt

SEQ ID NO: 13147 - RNA, 22 nt, synthetic construct
  source 1..22: mol_type = other RNA
tctctccattcttcagtaagtc

SEQ ID NO: 13148 - RNA, 22 nt, synthetic construct
  source 1..22: mol_type = other RNA
aattctctctccattcttcagt

SEQ ID NO: 13149 - RNA, 22 nt, synthetic construct
  source 1..22: mol_type = other RNA
caattctctctccattcttcag

SEQ ID NO: 13150 - RNA, 22 nt, synthetic construct
  source 1..22: mol_type = other RNA
tcaattctctctccattcttca

SEQ ID NO: 13151 - RNA, 22 nt, synthetic construct
  source 1..22: mol_type = other RNA
agtgtagtacaagagatagaaa

SEQ ID NO: 13152 - RNA, 22 nt, synthetic construct
  source 1..22: mol_type = other RNA
agtgggggtgaattcagtgtag

SEQ ID NO: 13153 - RNA, 22 nt, synthetic construct
  source 1..22: mol_type = other RNA
cagtgggggtgaattcagtgta

SEQ ID NO: 13154 - RNA, 22 nt, synthetic construct
  source 1..22: mol_type = other RNA
tcagtgggggtgaattcagtgt

SEQ ID NO: 13155 - RNA, 22 nt, synthetic construct
  source 1..22: mol_type = other RNA
acacggcaggcatactcatctt

SEQ ID NO: 13156 - RNA, 22 nt, synthetic construct
  source 1..22: mol_type = other RNA
agcagcttacaaaagaatgtaa

SEQ ID NO: 13157 - RNA, 22 nt, synthetic construct
  source 1..22: mol_type = other RNA
tgatatgactactcatacacaa

SEQ ID NO: 13158 - RNA, 22 nt, synthetic construct
  source 1..22: mol_type = other RNA
tatcaaagcagctttatgatat

SEQ ID NO: 13159 - RNA, 22 nt, synthetic construct
  source 1..22: mol_type = other RNA
atatcaaagcagctttatgata

SEQ ID NO: 13160 - RNA, 22 nt, synthetic construct
  source 1..22: mol_type = other RNA
tatatcaaagcagctttatgat

SEQ ID NO: 13161 - RNA, 22 nt, synthetic construct
  source 1..22: mol_type = other RNA
ttatatcaaagcagctttatga

SEQ ID NO: 13162 - RNA, 22 nt, synthetic construct
  source 1..22: mol_type = other RNA
agggtagtatggccatagacct

SEQ ID NO: 13163 - RNA, 22 nt, synthetic construct
  source 1..22: mol_type = other RNA
tatcagatgggatgggactcat

SEQ ID NO: 13164 - RNA, 22 nt, synthetic construct
  source 1..22: mol_type = other RNA
atatcagatgggatgggactca

SEQ ID NO: 13165 - RNA, 22 nt, synthetic construct
  source 1..22: mol_type = other RNA
tttatatcagatgggatgggac

SEQ ID NO: 13166 - RNA, 22 nt, synthetic construct
  source 1..22: mol_type = other RNA
cctgacaatcccaatatgcaga

SEQ ID NO: 13167 - RNA, 22 nt, synthetic construct
  source 1..22: mol_type = other RNA
agaacattccctgacaatccca

SEQ ID NO: 13168 - RNA, 22 nt, synthetic construct
  source 1..22: mol_type = other RNA
agaaaccatgctgtgcatcagt

SEQ ID NO: 13169 - RNA, 22 nt, synthetic construct
  source 1..22: mol_type = other RNA
tgcaagtgctgctgctgctccc

SEQ ID NO: 13170 - RNA, 22 nt, synthetic construct
  source 1..22: mol_type = other RNA
gtgcaagtgctgctgctgctcc

SEQ ID NO: 13171 - RNA, 22 nt, synthetic construct
  source 1..22: mol_type = other RNA
agagtgtatatgtatttgtgca

SEQ ID NO: 13172 - RNA, 22 nt, synthetic construct
  source 1..22: mol_type = other RNA
agtgctaaatatacctgaagct

SEQ ID NO: 13173 - RNA, 22 nt, synthetic construct
  source 1..22: mol_type = other RNA
gttcagtgctaaatatacctga

SEQ ID NO: 13174 - RNA, 22 nt, synthetic construct
  source 1..22: mol_type = other RNA
taggatgctaggacagcaggac

SEQ ID NO: 13175 - RNA, 22 nt, synthetic construct
  source 1..22: mol_type = other RNA
gagctacccagcaggaacaagc

SEQ ID NO: 13176 - RNA, 22 nt, synthetic construct
  source 1..22: mol_type = other RNA
agagctacccagcaggaacaag

SEQ ID NO: 13177 - RNA, 22 nt, synthetic construct
  source 1..22: mol_type = other RNA
tttagagctacccagcaggaac

SEQ ID NO: 13178 - RNA, 22 nt, synthetic construct
  source 1..22: mol_type = other RNA
ctacccatgaatacattgttta

SEQ ID NO: 13179 - RNA, 22 nt, synthetic construct
  source 1..22: mol_type = other RNA
gaaataaggctggcagaatagg

SEQ ID NO: 13180 - RNA, 22 nt, synthetic construct
  source 1..22: mol_type = other RNA
aaataccatgtactaacaaatg

SEQ ID NO: 13181 - RNA, 22 nt, synthetic construct
  source 1..22: mol_type = other RNA
aaaataccatgtactaacaaat

SEQ ID NO: 13182 - RNA, 22 nt, synthetic construct
  source 1..22: mol_type = other RNA
cttttaaaataccatgtactaa

SEQ ID NO: 13183 - RNA, 22 nt, synthetic construct
  source 1..22: mol_type = other RNA
acttttaaaataccatgtacta

SEQ ID NO: 13184 - RNA, 22 nt, synthetic construct
  source 1..22: mol_type = other RNA
tacttttaaaataccatgtact

SEQ ID NO: 13185 - RNA, 22 nt, synthetic construct
  source 1..22: mol_type = other RNA
agttttacttttaaaataccat

SEQ ID NO: 13186 - RNA, 22 nt, synthetic construct
  source 1..22: mol_type = other RNA
tcaaggtcaaaaacttacctcc

SEQ ID NO: 13187 - RNA, 22 nt, synthetic construct
  source 1..22: mol_type = other RNA
ctcaaggtcaaaaacttacctc

SEQ ID NO: 13188 - RNA, 22 nt, synthetic construct
  source 1..22: mol_type = other RNA
tctcaaggtcaaaaacttacct

SEQ ID NO: 13189 - RNA, 22 nt, synthetic construct
  source 1..22: mol_type = other RNA
gagctgtctataaatagtcctc

SEQ ID NO: 13190 - RNA, 22 nt, synthetic construct
  source 1..22: mol_type = other RNA
tcatgttagagctgtctataaa

SEQ ID NO: 13191 - RNA, 22 nt, synthetic construct
  source 1..22: mol_type = other RNA
tccacatagtgagggttatcat

SEQ ID NO: 13192 - RNA, 22 nt, synthetic construct
  source 1..22: mol_type = other RNA
ctctgtcaatgttctccacata

SEQ ID NO: 13193 - RNA, 22 nt, synthetic construct
  source 1..22: mol_type = other RNA
cctgctaaaatgttactctgtc

SEQ ID NO: 13194 - RNA, 22 nt, synthetic construct
  source 1..22: mol_type = other RNA
ttctttccctgctaaaatgtta

SEQ ID NO: 13195 - RNA, 22 nt, synthetic construct
  source 1..22: mol_type = other RNA
ccctctctgtagagggtcagta

SEQ ID NO: 13196 - RNA, 22 nt, synthetic construct
  source 1..22: mol_type = other RNA
ctttgccctctctgtagagggt

SEQ ID NO: 13197 - RNA, 22 nt, synthetic construct
  source 1..22: mol_type = other RNA
tcctgcaataccatactggcag

SEQ ID NO: 13198 - RNA, 22 nt, synthetic construct
  source 1..22: mol_type = other RNA
tctcctcagcagagatgtccaa

SEQ ID NO: 13199 - RNA, 22 nt, synthetic construct
  source 1..22: mol_type = other RNA
ctctcctcagcagagatgtcca

SEQ ID NO: 13200 - RNA, 22 nt, synthetic construct
  source 1..22: mol_type = other RNA
tctctcctcagcagagatgtcc

SEQ ID NO: 13201 - RNA, 22 nt, synthetic construct
  source 1..22: mol_type = other RNA
attttctctcctcagcagagat

SEQ ID NO: 13202 - RNA, 22 nt, synthetic construct
  source 1..22: mol_type = other RNA
tacaaaggaaaagagtggttca

SEQ ID NO: 13203 - RNA, 22 nt, synthetic construct
  source 1..22: mol_type = other RNA
tctcctctagtggcctgggaac

SEQ ID NO: 13204 - RNA, 22 nt, synthetic construct
  source 1..22: mol_type = other RNA
cctttatctcctctagtggcct

SEQ ID NO: 13205 - RNA, 22 nt, synthetic construct
  source 1..22: mol_type = other RNA
ccctttatctcctctagtggcc

SEQ ID NO: 13206 - RNA, 22 nt, synthetic construct
  source 1..22: mol_type = other RNA
taacaatctgtttccctttatc

SEQ ID NO: 13207 - RNA, 22 nt, synthetic construct
  source 1..22: mol_type = other RNA
tatcaagttataacaatctgtt

SEQ ID NO: 13208 - RNA, 22 nt, synthetic construct
  source 1..22: mol_type = other RNA
tagtatcattatatcaagttat

SEQ ID NO: 13209 - RNA, 22 nt, synthetic construct
  source 1..22: mol_type = other RNA
catctattatagtatcattata

SEQ ID NO: 13210 - RNA, 22 nt, synthetic construct
  source 1..22: mol_type = other RNA
ctccctctctcttgcttctgga

SEQ ID NO: 13211 - RNA, 22 nt, synthetic construct
  source 1..22: mol_type = other RNA
gactccaactaaagatgcagag

SEQ ID NO: 13212 - RNA, 22 nt, synthetic construct
  source 1..22: mol_type = other RNA
aaaagcctttggactccaacta

SEQ ID NO: 13213 - RNA, 22 nt, synthetic construct
  source 1..22: mol_type = other RNA
attgaaaagcctttggactcca

SEQ ID NO: 13214 - RNA, 22 nt, synthetic construct
  source 1..22: mol_type = other RNA
cattgaaaagcctttggactcc

SEQ ID NO: 13215 - RNA, 22 nt, synthetic construct
  source 1..22: mol_type = other RNA
agcatcaatgtaccctgggcag

SEQ ID NO: 13216 - RNA, 22 nt, synthetic construct
  source 1..22: mol_type = other RNA
cagcatcaatgtaccctgggca

SEQ ID NO: 13217 - RNA, 22 nt, synthetic construct
  source 1..22: mol_type = other RNA
aatggggtttcagcatcaatgt

SEQ ID NO: 13218 - RNA, 22 nt, synthetic construct
  source 1..22: mol_type = other RNA
gaatggggtttcagcatcaatg

SEQ ID NO: 13219 - RNA, 22 nt, synthetic construct
  source 1..22: mol_type = other RNA
tagaatataacaggagatttga

SEQ ID NO: 13220 - RNA, 22 nt, synthetic construct
  source 1..22: mol_type = other RNA
cctgttctagaatataacagga

SEQ ID NO: 13221 - RNA, 22 nt, synthetic construct
  source 1..22: mol_type = other RNA
ctaacagtgtgactgggcagat

SEQ ID NO: 13222 - RNA, 22 nt, synthetic construct
  source 1..22: mol_type = other RNA
actaacagtgtgactgggcaga

SEQ ID NO: 13223 - RNA, 22 nt, synthetic construct
  source 1..22: mol_type = other RNA
aggtcctggctctacaatttac

SEQ ID NO: 13224 - RNA, 22 nt, synthetic construct
  source 1..22: mol_type = other RNA
gagttcaggtcctggctctaca

SEQ ID NO: 13225 - RNA, 22 nt, synthetic construct
  source 1..22: mol_type = other RNA
agtaacacatgactatattaga

SEQ ID NO: 13226 - RNA, 22 nt, synthetic construct
  source 1..22: mol_type = other RNA
tcagaacatgtccccgtcatta

SEQ ID NO: 13227 - RNA, 22 nt, synthetic construct
  source 1..22: mol_type = other RNA
ctcagaacatgtccccgtcatt

SEQ ID NO: 13228 - RNA, 22 nt, synthetic construct
  source 1..22: mol_type = other RNA
tgtaagcatttctcagaacatg

SEQ ID NO: 13229 - RNA, 22 nt, synthetic construct
  source 1..22: mol_type = other RNA
gtgtaagcatttctcagaacat

SEQ ID NO: 13230 - RNA, 22 nt, synthetic construct
  source 1..22: mol_type = other RNA
tagtctaggagcaataggctat

SEQ ID NO: 13231 - RNA, 22 nt, synthetic construct
  source 1..22: mol_type = other RNA
gtagtctaggagcaataggcta

SEQ ID NO: 13232 - RNA, 22 nt, synthetic construct
  source 1..22: mol_type = other RNA
agtacagtaacaggctgtacag

SEQ ID NO: 13233 - RNA, 22 nt, synthetic construct
  source 1..22: mol_type = other RNA
caactgcccacagtattcagta

SEQ ID NO: 13234 - RNA, 22 nt, synthetic construct
  source 1..22: mol_type = other RNA
tgttacaactgcccacagtatt

SEQ ID NO: 13235 - RNA, 22 nt, synthetic construct
  source 1..22: mol_type = other RNA
gatacacaaatacttaccattg

SEQ ID NO: 13236 - RNA, 22 nt, synthetic construct
  source 1..22: mol_type = other RNA
agatacacaaatacttaccatt

SEQ ID NO: 13237 - RNA, 22 nt, synthetic construct
  source 1..22: mol_type = other RNA
ctgcaacttctatgtttagata

SEQ ID NO: 13238 - RNA, 22 nt, synthetic construct
  source 1..22: mol_type = other RNA
actgcaacttctatgtttagat

SEQ ID NO: 13239 - RNA, 22 nt, synthetic construct
  source 1..22: mol_type = other RNA
tactgcaacttctatgtttaga

SEQ ID NO: 13240 - RNA, 22 nt, synthetic construct
  source 1..22: mol_type = other RNA
ttactgcaacttctatgtttag

SEQ ID NO: 13241 - RNA, 22 nt, synthetic construct
  source 1..22: mol_type = other RNA
aaatagcatatttttactgcaa

SEQ ID NO: 13242 - RNA, 22 nt, synthetic construct
  source 1..22: mol_type = other RNA
gtcaatgatggactgtatatat

SEQ ID NO: 13243 - RNA, 22 nt, synthetic construct
  source 1..22: mol_type = other RNA
ggtcaatgatggactgtatata

SEQ ID NO: 13244 - RNA, 22 nt, synthetic construct
  source 1..22: mol_type = other RNA
tggtcaatgatggactgtatat

SEQ ID NO: 13245 - RNA, 22 nt, synthetic construct
  source 1..22: mol_type = other RNA
gtgctcccaaaatcttagaaga

SEQ ID NO: 13246 - RNA, 22 nt, synthetic construct
  source 1..22: mol_type = other RNA
gtgtatccctttggtgctccca

SEQ ID NO: 13247 - RNA, 22 nt, synthetic construct
  source 1..22: mol_type = other RNA
taaagagtatatcctgttagtg

SEQ ID NO: 13248 - RNA, 22 nt, synthetic construct
  source 1..22: mol_type = other RNA
tccaaacccattataaagagta

SEQ ID NO: 13249 - RNA, 22 nt, synthetic construct
  source 1..22: mol_type = other RNA
aaagaagtagctgcagacagtt

SEQ ID NO: 13250 - RNA, 22 nt, synthetic construct
  source 1..22: mol_type = other RNA
aaaagaagtagctgcagacagt

SEQ ID NO: 13251 - RNA, 22 nt, synthetic construct
  source 1..22: mol_type = other RNA
taaaagaagtagctgcagacag

SEQ ID NO: 13252 - RNA, 22 nt, synthetic construct
  source 1..22: mol_type = other RNA
tactgtgtagatcaccttttta

SEQ ID NO: 13253 - RNA, 22 nt, synthetic construct
  source 1..22: mol_type = other RNA
ctactgtgtagatcaccttttt

SEQ ID NO: 13254 - RNA, 22 nt, synthetic construct
  source 1..22: mol_type = other RNA
ccaaacttgtctaatttctact

SEQ ID NO: 13255 - RNA, 22 nt, synthetic construct
  source 1..22: mol_type = other RNA
cagatctcattaccaaacttgt

SEQ ID NO: 13256 - RNA, 22 nt, synthetic construct
  source 1..22: mol_type = other RNA
gattgcagatctcattaccaaa

SEQ ID NO: 13257 - RNA, 22 nt, synthetic construct
  source 1..22: mol_type = other RNA
ggattgcagatctcattaccaa

SEQ ID NO: 13258 - RNA, 22 nt, synthetic construct
  source 1..22: mol_type = other RNA
tttggattgcagatctcattac

SEQ ID NO: 13259 - RNA, 22 nt, synthetic construct
  source 1..22: mol_type = other RNA
atttggattgcagatctcatta

SEQ ID NO: 13260 - RNA, 22 nt, synthetic construct
  source 1..22: mol_type = other RNA
tatttggattgcagatctcatt

SEQ ID NO: 13261 - RNA, 22 nt, synthetic construct
  source 1..22: mol_type = other RNA
ttttatttggattgcagatctc

SEQ ID NO: 13262 - RNA, 22 nt, synthetic construct
  source 1..22: mol_type = other RNA
attttatttggattgcagatct

SEQ ID NO: 13263 - RNA, 22 nt, synthetic construct
  source 1..22: mol_type = other RNA
gcaatgaatttattttatttgg

SEQ ID NO: 13264 - RNA, 22 nt, synthetic construct
  source 1..22: mol_type = other RNA
atccaatccaaatgcggcatct

SEQ ID NO: 13265 - RNA, 22 nt, synthetic construct
  source 1..22: mol_type = other RNA
gaattcatccaatccaaatgcg

SEQ ID NO: 13266 - RNA, 22 nt, synthetic construct
  source 1..22: mol_type = other RNA
ggaattcatccaatccaaatgc

SEQ ID NO: 13267 - RNA, 22 nt, synthetic construct
  source 1..22: mol_type = other RNA
aaaagcaagcaagcagaatttg

SEQ ID NO: 13268 - RNA, 22 nt, synthetic construct
  source 1..22: mol_type = other RNA
tgcataaagtgtaagtgtataa

SEQ ID NO: 13269 - RNA, 22 nt, synthetic construct
  source 1..22: mol_type = other RNA
gtgcataaagtgtaagtgtata

SEQ ID NO: 13270 - RNA, 22 nt, synthetic construct
  source 1..22: mol_type = other RNA
tgtgcataaagtgtaagtgtat

SEQ ID NO: 13271 - RNA, 22 nt, synthetic construct
  source 1..22: mol_type = other RNA
taaccctacattttgtgcataa

SEQ ID NO: 13272 - RNA, 22 nt, synthetic construct
  source 1..22: mol_type = other RNA
ttataaccctacattttgtgca

SEQ ID NO: 13273 - RNA, 22 nt, synthetic construct
  source 1..22: mol_type = other RNA
acattattataaccctacattt

SEQ ID NO: 13274 - RNA, 22 nt, synthetic construct
  source 1..22: mol_type = other RNA
taaagaagatcatgtccatgtt

SEQ ID NO: 13275 - RNA, 22 nt, synthetic construct
  source 1..22: mol_type = other RNA
ccagccctcctagagctacctg

SEQ ID NO: 13276 - RNA, 22 nt, synthetic construct
  source 1..22: mol_type = other RNA
tctgctccccacctctaagttg

SEQ ID NO: 13277 - RNA, 22 nt, synthetic construct
  source 1..22: mol_type = other RNA
gataagagaattctctgctccc

SEQ ID NO: 13278 - RNA, 22 nt, synthetic construct
  source 1..22: mol_type = other RNA
atgttggataagagaattctct

SEQ ID NO: 13279 - RNA, 22 nt, synthetic construct
  source 1..22: mol_type = other RNA
aaatctgaccaagatgttgatg

SEQ ID NO: 13280 - RNA, 22 nt, synthetic construct
  source 1..22: mol_type = other RNA
aagagttcaaatctgaccaaga

SEQ ID NO: 13281 - RNA, 22 nt, synthetic construct
  source 1..22: mol_type = other RNA
agtgcaagagattgaagagttc

SEQ ID NO: 13282 - RNA, 22 nt, synthetic construct
  source 1..22: mol_type = other RNA
acttatgcacgcttaactatct

SEQ ID NO: 13283 - RNA, 22 nt, synthetic construct
  source 1..22: mol_type = other RNA
gaagttaacttatgcacgctta

SEQ ID NO: 13284 - RNA, 22 nt, synthetic construct
  source 1..22: mol_type = other RNA
taagcagagtatgtaaattgga

SEQ ID NO: 13285 - RNA, 22 nt, synthetic construct
  source 1..22: mol_type = other RNA
ccccaaattctaagcagagtat

SEQ ID NO: 13286 - RNA, 22 nt, synthetic construct
  source 1..22: mol_type = other RNA
cccccaaattctaagcagagta

SEQ ID NO: 13287 - RNA, 22 nt, synthetic construct
  source 1..22: mol_type = other RNA
tcccccaaattctaagcagagt

SEQ ID NO: 13288 - RNA, 22 nt, synthetic construct
  source 1..22: mol_type = other RNA
taaattttcccccaaattctaa

SEQ ID NO: 13289 - RNA, 22 nt, synthetic construct
  source 1..22: mol_type = other RNA
ctaaattttcccccaaattcta

SEQ ID NO: 13290 - RNA, 22 nt, synthetic construct
  source 1..22: mol_type = other RNA
tatttctaaattttcccccaaa

SEQ ID NO: 13291 - RNA, 22 nt, synthetic construct
  source 1..22: mol_type = other RNA
caataatcctgtcaattatatt

SEQ ID NO: 13292 - RNA, 22 nt, synthetic construct
  source 1..22: mol_type = other RNA
ccaataatcctgtcaattatat

SEQ ID NO: 13293 - RNA, 22 nt, synthetic construct
  source 1..22: mol_type = other RNA
taacaaatttccaataatcctg

SEQ ID NO: 13294 - RNA, 22 nt, synthetic construct
  source 1..22: mol_type = other RNA
attataacaaatttccaataat

SEQ ID NO: 13295 - RNA, 22 nt, synthetic construct
  source 1..22: mol_type = other RNA
attcattataacaaatttccaa

SEQ ID NO: 13296 - RNA, 22 nt, synthetic construct
  source 1..22: mol_type = other RNA
cattcattataacaaatttcca

SEQ ID NO: 13297 - RNA, 22 nt, synthetic construct
  source 1..22: mol_type = other RNA
tcaaatgtataagaagtaaata

SEQ ID NO: 13298 - RNA, 22 nt, synthetic construct
  source 1..22: mol_type = other RNA
accacaaccatgccttacttta

SEQ ID NO: 13299 - RNA, 22 nt, synthetic construct
  source 1..22: mol_type = other RNA
acttgtggaacaaaaataaacc

SEQ ID NO: 13300 - RNA, 22 nt, synthetic construct
  source 1..22: mol_type = other RNA
aacttgtggaacaaaaataaac

SEQ ID NO: 13301 - RNA, 22 nt, synthetic construct
  source 1..22: mol_type = other RNA
tttaacttgtggaacaaaaata

SEQ ID NO: 13302 - RNA, 22 nt, synthetic construct
  source 1..22: mol_type = other RNA
atttaacttgtggaacaaaaat

SEQ ID NO: 13303 - RNA, 22 nt, synthetic construct
  source 1..22: mol_type = other RNA
tgatttatttaacttgtggaac

SEQ ID NO: 13304 - RNA, 22 nt, synthetic construct
  source 1..22: mol_type = other RNA
atgatttatttaacttgtggaa

SEQ ID NO: 13305 - RNA, 22 nt, synthetic construct
  source 1..22: mol_type = other RNA
tatgatttatttaacttgtgga

SEQ ID NO: 13306 - RNA, 22 nt, synthetic construct
  source 1..22: mol_type = other RNA
aaaataaaggggtaatagtggg

SEQ ID NO: 13307 - RNA, 22 nt, synthetic construct
  source 1..22: mol_type = other RNA
gaaaataaaggggtaatagtgg

SEQ ID NO: 13308 - RNA, 22 nt, synthetic construct
  source 1..22: mol_type = other RNA
cctgtttgaaaataaaggggta

SEQ ID NO: 13309 - RNA, 22 nt, synthetic construct
  source 1..22: mol_type = other RNA
ccctgtttgaaaataaaggggt

SEQ ID NO: 13310 - RNA, 22 nt, synthetic construct
  source 1..22: mol_type = other RNA
ccaagtggaacttgaagactgt

SEQ ID NO: 13311 - RNA, 22 nt, synthetic construct
  source 1..22: mol_type = other RNA
accaagtggaacttgaagactg

SEQ ID NO: 13312 - RNA, 22 nt, synthetic construct
  source 1..22: mol_type = other RNA
taccaagtggaacttgaagact

SEQ ID NO: 13313 - RNA, 22 nt, synthetic construct
  source 1..22: mol_type = other RNA
ttaccaagtggaacttgaagac

SEQ ID NO: 13314 - RNA, 22 nt, synthetic construct
  source 1..22: mol_type = other RNA
tttaccaagtggaacttgaaga

SEQ ID NO: 13315 - RNA, 22 nt, synthetic construct
  source 1..22: mol_type = other RNA
acattttttaccaagtggaact

SEQ ID NO: 13316 - RNA, 22 nt, synthetic construct
  source 1..22: mol_type = other RNA
cactgtgagccaaactctatat

SEQ ID NO: 13317 - RNA, 22 nt, synthetic construct
  source 1..22: mol_type = other RNA
ctaatctggaaaatgtgaatca

SEQ ID NO: 13318 - RNA, 22 nt, synthetic construct
  source 1..22: mol_type = other RNA
agcatcagattcctaatctgga

SEQ ID NO: 13319 - RNA, 22 nt, synthetic construct
  source 1..22: mol_type = other RNA
acttctttgagcatcagattcc

SEQ ID NO: 13320 - RNA, 22 nt, synthetic construct
  source 1..22: mol_type = other RNA
aacttctttgagcatcagattc

SEQ ID NO: 13321 - RNA, 22 nt, synthetic construct
  source 1..22: mol_type = other RNA
ctccctcttagagtctgcatac

SEQ ID NO: 13322 - RNA, 22 nt, synthetic construct
  source 1..22: mol_type = other RNA
gctccctcttagagtctgcata

SEQ ID NO: 13323 - RNA, 22 nt, synthetic construct
  source 1..22: mol_type = other RNA
aatccttcagatacttttgctc

SEQ ID NO: 13324 - RNA, 22 nt, synthetic construct
  source 1..22: mol_type = other RNA
cttgctaaaatattaaatcctt

SEQ ID NO: 13325 - RNA, 22 nt, synthetic construct
  source 1..22: mol_type = other RNA
tatatctattccttgctaaaat

SEQ ID NO: 13326 - RNA, 22 nt, synthetic construct
  source 1..22: mol_type = other RNA
gtgtccaagaaggggtcctgaa

SEQ ID NO: 13327 - RNA, 22 nt, synthetic construct
  source 1..22: mol_type = other RNA
ggtgtccaagaaggggtcctga

SEQ ID NO: 13328 - RNA, 22 nt, synthetic construct
  source 1..22: mol_type = other RNA
tagaagggacttaaatatccat

SEQ ID NO: 13329 - RNA, 22 nt, synthetic construct
  source 1..22: mol_type = other RNA
atagaagggacttaaatatcca

SEQ ID NO: 13330 - RNA, 22 nt, synthetic construct
  source 1..22: mol_type = other RNA
tatagaagggacttaaatatcc

SEQ ID NO: 13331 - RNA, 22 nt, synthetic construct
  source 1..22: mol_type = other RNA
tatgcaaatactataccatttt

SEQ ID NO: 13332 - RNA, 22 nt, synthetic construct
  source 1..22: mol_type = other RNA
aagtatacaggaggatgtggat

SEQ ID NO: 13333 - RNA, 22 nt, synthetic construct
  source 1..22: mol_type = other RNA
aaagtatacaggaggatgtgga

SEQ ID NO: 13334 - RNA, 22 nt, synthetic construct
  source 1..22: mol_type = other RNA
caagtaatctagaaatgattta

SEQ ID NO: 13335 - RNA, 22 nt, synthetic construct
  source 1..22: mol_type = other RNA
ggtattacaagtaatctagaaa

SEQ ID NO: 13336 - RNA, 22 nt, synthetic construct
  source 1..22: mol_type = other RNA
tattaggtattacaagtaatct

SEQ ID NO: 13337 - RNA, 22 nt, synthetic construct
  source 1..22: mol_type = other RNA
cattgtattaggtattacaagt

SEQ ID NO: 13338 - RNA, 22 nt, synthetic construct
  source 1..22: mol_type = other RNA
acattgtattaggtattacaag

SEQ ID NO: 13339 - RNA, 22 nt, synthetic construct
  source 1..22: mol_type = other RNA
catagcatttacattgtattag

SEQ ID NO: 13340 - RNA, 22 nt, synthetic construct
  source 1..22: mol_type = other RNA
gcatagcatttacattgtatta

SEQ ID NO: 13341 - RNA, 22 nt, synthetic construct
  source 1..22: mol_type = other RNA
cttaaacaataacaactatttg

SEQ ID NO: 13342 - RNA, 22 nt, synthetic construct
  source 1..22: mol_type = other RNA
ttccttaaacaataacaactat

SEQ ID NO: 13343 - RNA, 22 nt, synthetic construct
  source 1..22: mol_type = other RNA
ttgtcattattccttaaacaat

SEQ ID NO: 13344 - RNA, 22 nt, synthetic construct
  source 1..22: mol_type = other RNA
cttgtcattattccttaaacaa

SEQ ID NO: 13345 - RNA, 22 nt, synthetic construct
  source 1..22: mol_type = other RNA
tcttgtcattattccttaaaca

SEQ ID NO: 13346 - RNA, 22 nt, synthetic construct
  source 1..22: mol_type = other RNA
ttcttgtcattattccttaaac

SEQ ID NO: 13347 - RNA, 22 nt, synthetic construct
  source 1..22: mol_type = other RNA
tttcttgtcattattccttaaa

SEQ ID NO: 13348 - RNA, 22 nt, synthetic construct
  source 1..22: mol_type = other RNA
ttttcttgtcattattccttaa

SEQ ID NO: 13349 - RNA, 22 nt, synthetic construct
  source 1..22: mol_type = other RNA
ctgagcatgtacagactttttt

SEQ ID NO: 13350 - RNA, 22 nt, synthetic construct
  source 1..22: mol_type = other RNA
tgtctttactgagcatgtacag

SEQ ID NO: 13351 - RNA, 22 nt, synthetic construct
  source 1..22: mol_type = other RNA
agcaaaccatggatcaaaaaca

SEQ ID NO: 13352 - RNA, 22 nt, synthetic construct
  source 1..22: mol_type = other RNA
aaagtacagcgggccttccgta

SEQ ID NO: 13353 - RNA, 22 nt, synthetic construct
  source 1..22: mol_type = other RNA
tcattcaaagtacagcgggcct

SEQ ID NO: 13354 - RNA, 22 nt, synthetic construct
  source 1..22: mol_type = other RNA
gtcattcaaagtacagcgggcc

SEQ ID NO: 13355 - RNA, 22 nt, synthetic construct
  source 1..22: mol_type = other RNA
tttgtcattcaaagtacagcgg

SEQ ID NO: 13356 - RNA, 22 nt, synthetic construct
  source 1..22: mol_type = other RNA
aatctgttatttgtcattcaaa

SEQ ID NO: 13357 - RNA, 22 nt, synthetic construct
  source 1..22: mol_type = other RNA
aaatctgttatttgtcattcaa

SEQ ID NO: 13358 - RNA, 22 nt, synthetic construct
  source 1..22: mol_type = other RNA
ctgaagctgacagcattcgggc

SEQ ID NO: 13359 - RNA, 22 nt, synthetic construct
  source 1..22: mol_type = other RNA
gggccgagatgtctcgctccgt

SEQ ID NO: 13360 - RNA, 22 nt, synthetic construct
  source 1..22: mol_type = other RNA
tggcctggaggctatccagcgt

SEQ ID NO: 13361 - RNA, 22 nt, synthetic construct
  source 1..22: mol_type = other RNA
tccttggtggcccgccgtgggg

SEQ ID NO: 13362 - RNA, 22 nt, synthetic construct
  source 1..22: mol_type = other RNA
ggcggggagcaggggagacctt

SEQ ID NO: 13363 - RNA, 22 nt, synthetic construct
  source 1..22: mol_type = other RNA
gcctacggcgacgggagggtcg

SEQ ID NO: 13364 - RNA, 22 nt, synthetic construct
  source 1..22: mol_type = other RNA
agggcgtcgataagcgtcagag

SEQ ID NO: 13365 - RNA, 22 nt, synthetic construct
  source 1..22: mol_type = other RNA
gggcgtcgataagcgtcagagc

SEQ ID NO: 13366 - RNA, 22 nt, synthetic construct
  source 1..22: mol_type = other RNA
ggggagggtttctcttccgctc

SEQ ID NO: 13367 - RNA, 22 nt, synthetic construct
  source 1..22: mol_type = other RNA
ctcttccgctctttcgcggggc

SEQ ID NO: 13368 - RNA, 22 nt, synthetic construct
  source 1..22: mol_type = other RNA
tcttccgctctttcgcggggcc

SEQ ID NO: 13369 - RNA, 22 nt, synthetic construct
  source 1..22: mol_type = other RNA
gcggggcctctggctcccccag

SEQ ID NO: 13370 - RNA, 22 nt, synthetic construct
  source 1..22: mol_type = other RNA
gtgaacgcgtggaggggcgctt

SEQ ID NO: 13371 - RNA, 22 nt, synthetic construct
  source 1..22: mol_type = other RNA
tgaacgcgtggaggggcgcttg

SEQ ID NO: 13372 - RNA, 22 nt, synthetic construct
  source 1..22: mol_type = other RNA
gcatgtcctagcacctctgggt

SEQ ID NO: 13373 - RNA, 22 nt, synthetic construct
  source 1..22: mol_type = other RNA
gtagaatgcttggctgtgatac

SEQ ID NO: 13374 - RNA, 22 nt, synthetic construct
  source 1..22: mol_type = other RNA
tagaatgcttggctgtgataca

SEQ ID NO: 13375 - RNA, 22 nt, synthetic construct
  source 1..22: mol_type = other RNA
cgaataattaacttatttgttc

SEQ ID NO: 13376 - RNA, 22 nt, synthetic construct
  source 1..22: mol_type = other RNA
gaataattaacttatttgttcc

SEQ ID NO: 13377 - RNA, 22 nt, synthetic construct
  source 1..22: mol_type = other RNA
acttatttgttcccatcacatg

SEQ ID NO: 13378 - RNA, 22 nt, synthetic construct
  source 1..22: mol_type = other RNA
gttcccatcacatgtcactttt

SEQ ID NO: 13379 - RNA, 22 nt, synthetic construct
  source 1..22: mol_type = other RNA
ttcccatcacatgtcactttta

SEQ ID NO: 13380 - RNA, 22 nt, synthetic construct
  source 1..22: mol_type = other RNA
ccatcacatgtcacttttaaaa

SEQ ID NO: 13381 - RNA, 22 nt, synthetic construct
  source 1..22: mol_type = other RNA
aaaaaattataagaactacccg

SEQ ID NO: 13382 - RNA, 22 nt, synthetic construct
  source 1..22: mol_type = other RNA
aaaaattataagaactacccgt

SEQ ID NO: 13383 - RNA, 22 nt, synthetic construct
  source 1..22: mol_type = other RNA
taagaactacccgttattgaca

SEQ ID NO: 13384 - RNA, 22 nt, synthetic construct
  source 1..22: mol_type = other RNA
ttgacatctttctgtgtgccaa

SEQ ID NO: 13385 - RNA, 22 nt, synthetic construct
  source 1..22: mol_type = other RNA
acatctttctgtgtgccaagga

SEQ ID NO: 13386 - RNA, 22 nt, synthetic construct
  source 1..22: mol_type = other RNA
tgtgtgccaaggactttatgtg

SEQ ID NO: 13387 - RNA, 22 nt, synthetic construct
  source 1..22: mol_type = other RNA
tgtgctttgcgtcatttaattt

SEQ ID NO: 13388 - RNA, 22 nt, synthetic construct
  source 1..22: mol_type = other RNA
cgtcatttaattttgaaaacag

SEQ ID NO: 13389 - RNA, 22 nt, synthetic construct
  source 1..22: mol_type = other RNA
aattttgaaaacagttatcttc

SEQ ID NO: 13390 - RNA, 22 nt, synthetic construct
  source 1..22: mol_type = other RNA
attttgaaaacagttatcttcc

SEQ ID NO: 13391 - RNA, 22 nt, synthetic construct
  source 1..22: mol_type = other RNA
tgaaaacagttatcttccgcca

SEQ ID NO: 13392 - RNA, 22 nt, synthetic construct
  source 1..22: mol_type = other RNA
gaaaacagttatcttccgccat

SEQ ID NO: 13393 - RNA, 22 nt, synthetic construct
  source 1..22: mol_type = other RNA
aaaacagttatcttccgccata

SEQ ID NO: 13394 - RNA, 22 nt, synthetic construct
  source 1..22: mol_type = other RNA
tcttccgccatagataactact

SEQ ID NO: 13395 - RNA, 22 nt, synthetic construct
  source 1..22: mol_type = other RNA
tcttctgcctctcacagatgaa

SEQ ID NO: 13396 - RNA, 22 nt, synthetic construct
  source 1..22: mol_type = other RNA
taagaaacttaattacacaggg

SEQ ID NO: 13397 - RNA, 22 nt, synthetic construct
  source 1..22: mol_type = other RNA
aagaaacttaattacacagggg

SEQ ID NO: 13398 - RNA, 22 nt, synthetic construct
  source 1..22: mol_type = other RNA
agaaacttaattacacagggga

SEQ ID NO: 13399 - RNA, 22 nt, synthetic construct
  source 1..22: mol_type = other RNA
cacaggggataaatggcagcaa

SEQ ID NO: 13400 - RNA, 22 nt, synthetic construct
  source 1..22: mol_type = other RNA
aagtcaagcctaaccagggctt

SEQ ID NO: 13401 - RNA, 22 nt, synthetic construct
  source 1..22: mol_type = other RNA
gcgggagcgcatgccttttggc

SEQ ID NO: 13402 - RNA, 22 nt, synthetic construct
  source 1..22: mol_type = other RNA
cgggagcgcatgccttttggct

SEQ ID NO: 13403 - RNA, 22 nt, synthetic construct
  source 1..22: mol_type = other RNA
ggctgtaattcgtgcatttttt

SEQ ID NO: 13404 - RNA, 22 nt, synthetic construct
  source 1..22: mol_type = other RNA
gctgtaattcgtgcattttttt

SEQ ID NO: 13405 - RNA, 22 nt, synthetic construct
  source 1..22: mol_type = other RNA
gtgcatttttttttaagaaaaa

SEQ ID NO: 13406 - RNA, 22 nt, synthetic construct
  source 1..22: mol_type = other RNA
ttttttaagaaaaacgcctgcc

SEQ ID NO: 13407 - RNA, 22 nt, synthetic construct
  source 1..22: mol_type = other RNA
tttttaagaaaaacgcctgcct

SEQ ID NO: 13408 - RNA, 22 nt, synthetic construct
  source 1..22: mol_type = other RNA
ttttaagaaaaacgcctgcctt

SEQ ID NO: 13409 - RNA, 22 nt, synthetic construct
  source 1..22: mol_type = other RNA
tttaagaaaaacgcctgccttc

SEQ ID NO: 13410 - RNA, 22 nt, synthetic construct
  source 1..22: mol_type = other RNA
ttaagaaaaacgcctgccttct

SEQ ID NO: 13411 - RNA, 22 nt, synthetic construct
  source 1..22: mol_type = other RNA
taagaaaaacgcctgccttctg

SEQ ID NO: 13412 - RNA, 22 nt, synthetic construct
  source 1..22: mol_type = other RNA
aagaaaaacgcctgccttctgc

SEQ ID NO: 13413 - RNA, 22 nt, synthetic construct
  source 1..22: mol_type = other RNA
agaaaaacgcctgccttctgcg

SEQ ID NO: 13414 - RNA, 22 nt, synthetic construct
  source 1..22: mol_type = other RNA
tccagagcaaactgggcggcat

SEQ ID NO: 13415 - RNA, 22 nt, synthetic construct
  source 1..22: mol_type = other RNA
cgtacagagggcttcctctttg

SEQ ID NO: 13416 - RNA, 22 nt, synthetic construct
  source 1..22: mol_type = other RNA
gtacagagggcttcctctttgg

SEQ ID NO: 13417 - RNA, 22 nt, synthetic construct
  source 1..22: mol_type = other RNA
gctctttgcctggttgtttcca

SEQ ID NO: 13418 - RNA, 22 nt, synthetic construct
  source 1..22: mol_type = other RNA
cctggttgtttccaagatgtac

SEQ ID NO: 13419 - RNA, 22 nt, synthetic construct
  source 1..22: mol_type = other RNA
tttccaagatgtactgtgcctc

SEQ ID NO: 13420 - RNA, 22 nt, synthetic construct
  source 1..22: mol_type = other RNA
ccaagatgtactgtgcctctta

SEQ ID NO: 13421 - RNA, 22 nt, synthetic construct
  source 1..22: mol_type = other RNA
caagatgtactgtgcctcttac

SEQ ID NO: 13422 - RNA, 22 nt, synthetic construct
  source 1..22: mol_type = other RNA
ggttttgaaaacatgagggggt

SEQ ID NO: 13423 - RNA, 22 nt, synthetic construct
  source 1..22: mol_type = other RNA
tgaaaacatgagggggttgggc

SEQ ID NO: 13424 - RNA, 22 nt, synthetic construct
  source 1..22: mol_type = other RNA
gaaaacatgagggggttgggcg

SEQ ID NO: 13425 - RNA, 22 nt, synthetic construct
  source 1..22: mol_type = other RNA
aaaacatgagggggttgggcgt

SEQ ID NO: 13426 - RNA, 22 nt, synthetic construct
  source 1..22: mol_type = other RNA
ggcgtggtagcttacgcctgta

SEQ ID NO: 13427 - RNA, 22 nt, synthetic construct
  source 1..22: mol_type = other RNA
agaccagcctggccaacatggt

SEQ ID NO: 13428 - RNA, 22 nt, synthetic construct
  source 1..22: mol_type = other RNA
gccgggtgtggtggctcgtgcc

SEQ ID NO: 13429 - RNA, 22 nt, synthetic construct
  source 1..22: mol_type = other RNA
gagctatcatggcgccagtgca

SEQ ID NO: 13430 - RNA, 22 nt, synthetic construct
  source 1..22: mol_type = other RNA
agctatcatggcgccagtgcac

SEQ ID NO: 13431 - RNA, 22 nt, synthetic construct
  source 1..22: mol_type = other RNA
gtcagtcaggggagctgtaaaa

SEQ ID NO: 13432 - RNA, 22 nt, synthetic construct
  source 1..22: mol_type = other RNA
tcagtcaggggagctgtaaaac

SEQ ID NO: 13433 - RNA, 22 nt, synthetic construct
  source 1..22: mol_type = other RNA
ataaagataatccaagatggtt

SEQ ID NO: 13434 - RNA, 22 nt, synthetic construct
  source 1..22: mol_type = other RNA
ccaagactgttgaggacgccag

SEQ ID NO: 13435 - RNA, 22 nt, synthetic construct
  source 1..22: mol_type = other RNA
aggacgccagagatcttgagca

SEQ ID NO: 13436 - RNA, 22 nt, synthetic construct
  source 1..22: mol_type = other RNA
taagtacctggcaatacactaa

SEQ ID NO: 13437 - RNA, 22 nt, synthetic construct
  source 1..22: mol_type = other RNA
cctctggcaaaacatgatcgaa

SEQ ID NO: 13438 - RNA, 22 nt, synthetic construct
  source 1..22: mol_type = other RNA
ctctggcaaaacatgatcgaaa

SEQ ID NO: 13439 - RNA, 22 nt, synthetic construct
  source 1..22: mol_type = other RNA
tgatcatgagaaaattgcattt

SEQ ID NO: 13440 - RNA, 22 nt, synthetic construct
  source 1..22: mol_type = other RNA
gatcatgagaaaattgcattta

SEQ ID NO: 13441 - RNA, 22 nt, synthetic construct
  source 1..22: mol_type = other RNA
atcatgagaaaattgcatttaa

SEQ ID NO: 13442 - RNA, 22 nt, synthetic construct
  source 1..22: mol_type = other RNA
catttaatttgaatacaattta

SEQ ID NO: 13443 - RNA, 22 nt, synthetic construct
  source 1..22: mol_type = other RNA
aatttgaatacaatttatttac

SEQ ID NO: 13444 - RNA, 22 nt, synthetic construct
  source 1..22: mol_type = other RNA
atttgaatacaatttatttaca

SEQ ID NO: 13445 - RNA, 22 nt, synthetic construct
  source 1..22: mol_type = other RNA
gaatacaatttatttacaacat

SEQ ID NO: 13446 - RNA, 22 nt, synthetic construct
  source 1..22: mol_type = other RNA
aatacaatttatttacaacata

SEQ ID NO: 13447 - RNA, 22 nt, synthetic construct
  source 1..22: mol_type = other RNA
atttacaacataaaggataatg

SEQ ID NO: 13448 - RNA, 22 nt, synthetic construct
  source 1..22: mol_type = other RNA
tttacaacataaaggataatgt

SEQ ID NO: 13449 - RNA, 22 nt, synthetic construct
  source 1..22: mol_type = other RNA
acaacataaaggataatgtata

SEQ ID NO: 13450 - RNA, 22 nt, synthetic construct
  source 1..22: mol_type = other RNA
caacataaaggataatgtatat

SEQ ID NO: 13451 - RNA, 22 nt, synthetic construct
  source 1..22: mol_type = other RNA
ctggtatttgctggttatgtta

SEQ ID NO: 13452 - RNA, 22 nt, synthetic construct
  source 1..22: mol_type = other RNA
gctggttatgttagatgtcatt

SEQ ID NO: 13453 - RNA, 22 nt, synthetic construct
  source 1..22: mol_type = other RNA
ctggttatgttagatgtcattt

SEQ ID NO: 13454 - RNA, 22 nt, synthetic construct
  source 1..22: mol_type = other RNA
tgttagatgtcattttaaaaaa

SEQ ID NO: 13455 - RNA, 22 nt, synthetic construct
  source 1..22: mol_type = other RNA
gatgtcattttaaaaaataaca

SEQ ID NO: 13456 - RNA, 22 nt, synthetic construct
  source 1..22: mol_type = other RNA
taaaaaataacaatctgatatt

SEQ ID NO: 13457 - RNA, 22 nt, synthetic construct
  source 1..22: mol_type = other RNA
aaaaaataacaatctgatattt

SEQ ID NO: 13458 - RNA, 22 nt, synthetic construct
  source 1..22: mol_type = other RNA
aaaaataacaatctgatattta

SEQ ID NO: 13459 - RNA, 22 nt, synthetic construct
  source 1..22: mol_type = other RNA
aaaaaaaaatcttattttgaaa

SEQ ID NO: 13460 - RNA, 22 nt, synthetic construct
  source 1..22: mol_type = other RNA
aaaaaaaatcttattttgaaaa

SEQ ID NO: 13461 - RNA, 22 nt, synthetic construct
  source 1..22: mol_type = other RNA
tgaaaatttccaaagtaataca

SEQ ID NO: 13462 - RNA, 22 nt, synthetic construct
  source 1..22: mol_type = other RNA
gaaaatttccaaagtaatacat

SEQ ID NO: 13463 - RNA, 22 nt, synthetic construct
  source 1..22: mol_type = other RNA
aaaatttccaaagtaatacatg

SEQ ID NO: 13464 - RNA, 22 nt, synthetic construct
  source 1..22: mol_type = other RNA
ccaaagtaatacatgccatgca

SEQ ID NO: 13465 - RNA, 22 nt, synthetic construct
  source 1..22: mol_type = other RNA
caaagtaatacatgccatgcat

SEQ ID NO: 13466 - RNA, 22 nt, synthetic construct
  source 1..22: mol_type = other RNA
ctggaagataccacaagaaaca

SEQ ID NO: 13467 - RNA, 22 nt, synthetic construct
  source 1..22: mol_type = other RNA
tggaagataccacaagaaacat

SEQ ID NO: 13468 - RNA, 22 nt, synthetic construct
  source 1..22: mol_type = other RNA
cctctgaaggtctattttcctc

SEQ ID NO: 13469 - RNA, 22 nt, synthetic construct
  source 1..22: mol_type = other RNA
tcctcctctgacctgtgtgtgg

SEQ ID NO: 13470 - RNA, 22 nt, synthetic construct
  source 1..22: mol_type = other RNA
cctcctctgacctgtgtgtggg

SEQ ID NO: 13471 - RNA, 22 nt, synthetic construct
  source 1..22: mol_type = other RNA
ctcctctgacctgtgtgtgggt

SEQ ID NO: 13472 - RNA, 22 nt, synthetic construct
  source 1..22: mol_type = other RNA
tgtttttgttttactgtgggca

SEQ ID NO: 13473 - RNA, 22 nt, synthetic construct
  source 1..22: mol_type = other RNA
gtttttgttttactgtgggcat

SEQ ID NO: 13474 - RNA, 22 nt, synthetic construct
  source 1..22: mol_type = other RNA
tttttgttttactgtgggcata

SEQ ID NO: 13475 - RNA, 22 nt, synthetic construct
  source 1..22: mol_type = other RNA
ttgttttactgtgggcataaat

SEQ ID NO: 13476 - RNA, 22 nt, synthetic construct
  source 1..22: mol_type = other RNA
tgttttactgtgggcataaatt

SEQ ID NO: 13477 - RNA, 22 nt, synthetic construct
  source 1..22: mol_type = other RNA
gttttactgtgggcataaatta

SEQ ID NO: 13478 - RNA, 22 nt, synthetic construct
  source 1..22: mol_type = other RNA
ttttactgtgggcataaattaa

SEQ ID NO: 13479 - RNA, 22 nt, synthetic construct
  source 1..22: mol_type = other RNA
tactgtgggcataaattaattt

SEQ ID NO: 13480 - RNA, 22 nt, synthetic construct
  source 1..22: mol_type = other RNA
actgtgggcataaattaatttt

SEQ ID NO: 13481 - RNA, 22 nt, synthetic construct
  source 1..22: mol_type = other RNA
ctgtgggcataaattaattttt

SEQ ID NO: 13482 - RNA, 22 nt, synthetic construct
  source 1..22: mol_type = other RNA
atttttcagttaagttttggaa

SEQ ID NO: 13483 - RNA, 22 nt, synthetic construct
  source 1..22: mol_type = other RNA
ttcagttaagttttggaagctt

SEQ ID NO: 13484 - RNA, 22 nt, synthetic construct
  source 1..22: mol_type = other RNA
tcagttaagttttggaagctta

SEQ ID NO: 13485 - RNA, 22 nt, synthetic construct
  source 1..22: mol_type = other RNA
cagttaagttttggaagcttaa

SEQ ID NO: 13486 - RNA, 22 nt, synthetic construct
  source 1..22: mol_type = other RNA
agttaagttttggaagcttaaa

SEQ ID NO: 13487 - RNA, 22 nt, synthetic construct
  source 1..22: mol_type = other RNA
agttttggaagcttaaataact

SEQ ID NO: 13488 - RNA, 22 nt, synthetic construct
  source 1..22: mol_type = other RNA
tggaagcttaaataactctcca

SEQ ID NO: 13489 - RNA, 22 nt, synthetic construct
  source 1..22: mol_type = other RNA
ggaagcttaaataactctccaa

SEQ ID NO: 13490 - RNA, 22 nt, synthetic construct
  source 1..22: mol_type = other RNA
gaagcttaaataactctccaaa

SEQ ID NO: 13491 - RNA, 22 nt, synthetic construct
  source 1..22: mol_type = other RNA
agcccaaattcaaacccagcct

SEQ ID NO: 13492 - RNA, 22 nt, synthetic construct
  source 1..22: mol_type = other RNA
aaacccagcctgtctgatactt

SEQ ID NO: 13493 - RNA, 22 nt, synthetic construct
  source 1..22: mol_type = other RNA
cagtgatgctctcacaaaatct

SEQ ID NO: 13494 - RNA, 22 nt, synthetic construct
  source 1..22: mol_type = other RNA
caggcaggatgaatctgtgctc

SEQ ID NO: 13495 - RNA, 22 nt, synthetic construct
  source 1..22: mol_type = other RNA
aatatgttcttattattagaag

SEQ ID NO: 13496 - RNA, 22 nt, synthetic construct
  source 1..22: mol_type = other RNA
atatgttcttattattagaagc

SEQ ID NO: 13497 - RNA, 22 nt, synthetic construct
  source 1..22: mol_type = other RNA
ttattattagaagctcagatgc

SEQ ID NO: 13498 - RNA, 22 nt, synthetic construct
  source 1..22: mol_type = other RNA
ttagaagctcagatgcaaagag

SEQ ID NO: 13499 - RNA, 22 nt, synthetic construct
  source 1..22: mol_type = other RNA
gaagctcagatgcaaagagctc

SEQ ID NO: 13500 - RNA, 22 nt, synthetic construct
  source 1..22: mol_type = other RNA
aatgttatgaaaaaaatcaggt

SEQ ID NO: 13501 - RNA, 22 nt, synthetic construct
  source 1..22: mol_type = other RNA
atgttatgaaaaaaatcaggtc

SEQ ID NO: 13502 - RNA, 22 nt, synthetic construct
  source 1..22: mol_type = other RNA
tgaaaaaaatcaggtcttcatt

SEQ ID NO: 13503 - RNA, 22 nt, synthetic construct
  source 1..22: mol_type = other RNA
gattccccaatccacctcttga

SEQ ID NO: 13504 - RNA, 22 nt, synthetic construct
  source 1..22: mol_type = other RNA
cccaatccacctcttgatgggg

SEQ ID NO: 13505 - RNA, 22 nt, synthetic construct
  source 1..22: mol_type = other RNA
cttaatgatagggtgtttctag

SEQ ID NO: 13506 - RNA, 22 nt, synthetic construct
  source 1..22: mol_type = other RNA
ctagagagatatatctggtcaa

SEQ ID NO: 13507 - RNA, 22 nt, synthetic construct
  source 1..22: mol_type = other RNA
tagagagatatatctggtcaag

SEQ ID NO: 13508 - RNA, 22 nt, synthetic construct
  source 1..22: mol_type = other RNA
agtgatcatgtaccctgaatat

SEQ ID NO: 13509 - RNA, 22 nt, synthetic construct
  source 1..22: mol_type = other RNA
gtgatcatgtaccctgaatata

SEQ ID NO: 13510 - RNA, 22 nt, synthetic construct
  source 1..22: mol_type = other RNA
aaaagaattttatacacatata

SEQ ID NO: 13511 - RNA, 22 nt, synthetic construct
  source 1..22: mol_type = other RNA
aaagaattttatacacatatat

SEQ ID NO: 13512 - RNA, 22 nt, synthetic construct
  source 1..22: mol_type = other RNA
tatacacatatatttagtgtca

SEQ ID NO: 13513 - RNA, 22 nt, synthetic construct
  source 1..22: mol_type = other RNA
atacacatatatttagtgtcaa

SEQ ID NO: 13514 - RNA, 22 nt, synthetic construct
  source 1..22: mol_type = other RNA
tacacatatatttagtgtcaat

SEQ ID NO: 13515 - RNA, 22 nt, synthetic construct
  source 1..22: mol_type = other RNA
agtgtcaatctgtatatttagt

SEQ ID NO: 13516 - RNA, 22 nt, synthetic construct
  source 1..22: mol_type = other RNA
gtgtcaatctgtatatttagta

SEQ ID NO: 13517 - RNA, 22 nt, synthetic construct
  source 1..22: mol_type = other RNA
agtagcactaacacttctcttc

SEQ ID NO: 13518 - RNA, 22 nt, synthetic construct
  source 1..22: mol_type = other RNA
gtagcactaacacttctcttca

SEQ ID NO: 13519 - RNA, 22 nt, synthetic construct
  source 1..22: mol_type = other RNA
tcaatgaaaaatatagagttta

SEQ ID NO: 13520 - RNA, 22 nt, synthetic construct
  source 1..22: mol_type = other RNA
caatgaaaaatatagagtttat

SEQ ID NO: 13521 - RNA, 22 nt, synthetic construct
  source 1..22: mol_type = other RNA
aatgaaaaatatagagtttata

SEQ ID NO: 13522 - RNA, 22 nt, synthetic construct
  source 1..22: mol_type = other RNA
ataatattttcttcccacttcc

SEQ ID NO: 13523 - RNA, 22 nt, synthetic construct
  source 1..22: mol_type = other RNA
taatattttcttcccacttccc

SEQ ID NO: 13524 - RNA, 22 nt, synthetic construct
  source 1..22: mol_type = other RNA
tcttcccacttccccatggatg

SEQ ID NO: 13525 - RNA, 22 nt, synthetic construct
  source 1..22: mol_type = other RNA
cttcccacttccccatggatgg

SEQ ID NO: 13526 - RNA, 22 nt, synthetic construct
  source 1..22: mol_type = other RNA
ttcccacttccccatggatggt

SEQ ID NO: 13527 - RNA, 22 nt, synthetic construct
  source 1..22: mol_type = other RNA
tggaaagtactgtttctgaaac

SEQ ID NO: 13528 - RNA, 22 nt, synthetic construct
  source 1..22: mol_type = other RNA
ggaaagtactgtttctgaaaca

SEQ ID NO: 13529 - RNA, 22 nt, synthetic construct
  source 1..22: mol_type = other RNA
gaaagtactgtttctgaaacat

SEQ ID NO: 13530 - RNA, 22 nt, synthetic construct
  source 1..22: mol_type = other RNA
ctgaaacattaggcaatatatt

SEQ ID NO: 13531 - RNA, 22 nt, synthetic construct
  source 1..22: mol_type = other RNA
tgaaacattaggcaatatattc

SEQ ID NO: 13532 - RNA, 22 nt, synthetic construct
  source 1..22: mol_type = other RNA
ggcaatatattcccaacctggc

SEQ ID NO: 13533 - RNA, 22 nt, synthetic construct
  source 1..22: mol_type = other RNA
ccaacctggctagtttacagca

SEQ ID NO: 13534 - RNA, 22 nt, synthetic construct
  source 1..22: mol_type = other RNA
acagcaatcacctgtggatgct

SEQ ID NO: 13535 - RNA, 22 nt, synthetic construct
  source 1..22: mol_type = other RNA
cagcaatcacctgtggatgcta

SEQ ID NO: 13536 - RNA, 22 nt, synthetic construct
  source 1..22: mol_type = other RNA
aaacgcaaatcccactgtcaca

SEQ ID NO: 13537 - RNA, 22 nt, synthetic construct
  source 1..22: mol_type = other RNA
ctccatttgatcataatggaaa

SEQ ID NO: 13538 - RNA, 22 nt, synthetic construct
  source 1..22: mol_type = other RNA
gatcataatggaaagtatgttc

SEQ ID NO: 13539 - RNA, 22 nt, synthetic construct
  source 1..22: mol_type = other RNA
atcataatggaaagtatgttct

SEQ ID NO: 13540 - RNA, 22 nt, synthetic construct
  source 1..22: mol_type = other RNA
tgtcccatttgccatagtcctc

SEQ ID NO: 13541 - RNA, 22 nt, synthetic construct
  source 1..22: mol_type = other RNA
gccatagtcctcacctatccct

SEQ ID NO: 13542 - RNA, 22 nt, synthetic construct
  source 1..22: mol_type = other RNA
ccatagtcctcacctatccctg

SEQ ID NO: 13543 - RNA, 22 nt, synthetic construct
  source 1..22: mol_type = other RNA
tattttatcgggtccaactcaa

SEQ ID NO: 13544 - RNA, 22 nt, synthetic construct
  source 1..22: mol_type = other RNA
tatcgggtccaactcaaccatt

SEQ ID NO: 13545 - RNA, 22 nt, synthetic construct
  source 1..22: mol_type = other RNA
atcgggtccaactcaaccattt

SEQ ID NO: 13546 - RNA, 22 nt, synthetic construct
  source 1..22: mol_type = other RNA
tcgggtccaactcaaccattta

SEQ ID NO: 13547 - RNA, 22 nt, synthetic construct
  source 1..22: mol_type = other RNA
aaggtatttgccagctcttgta

SEQ ID NO: 13548 - RNA, 22 nt, synthetic construct
  source 1..22: mol_type = other RNA
aggtatttgccagctcttgtat

SEQ ID NO: 13549 - RNA, 22 nt, synthetic construct
  source 1..22: mol_type = other RNA
gccagctcttgtatgcatttag

SEQ ID NO: 13550 - RNA, 22 nt, synthetic construct
  source 1..22: mol_type = other RNA
ccagctcttgtatgcatttagg

SEQ ID NO: 13551 - RNA, 22 nt, synthetic construct
  source 1..22: mol_type = other RNA
aggttttgtttctttgtttttt

SEQ ID NO: 13552 - RNA, 22 nt, synthetic construct
  source 1..22: mol_type = other RNA
ggttttgtttctttgtttttta

SEQ ID NO: 13553 - RNA, 22 nt, synthetic construct
  source 1..22: mol_type = other RNA
tgtttctttgttttttagctca

SEQ ID NO: 13554 - RNA, 22 nt, synthetic construct
  source 1..22: mol_type = other RNA
gtttctttgttttttagctcat

SEQ ID NO: 13555 - RNA, 22 nt, synthetic construct
  source 1..22: mol_type = other RNA
tttctttgttttttagctcatg

SEQ ID NO: 13556 - RNA, 22 nt, synthetic construct
  source 1..22: mol_type = other RNA
ctttgttttttagctcatgaaa

SEQ ID NO: 13557 - RNA, 22 nt, synthetic construct
  source 1..22: mol_type = other RNA
tttgttttttagctcatgaaat

SEQ ID NO: 13558 - RNA, 22 nt, synthetic construct
  source 1..22: mol_type = other RNA
ttttttagctcatgaaattagg

SEQ ID NO: 13559 - RNA, 22 nt, synthetic construct
  source 1..22: mol_type = other RNA
tttagctcatgaaattaggtac

SEQ ID NO: 13560 - RNA, 22 nt, synthetic construct
  source 1..22: mol_type = other RNA
ttagctcatgaaattaggtaca

SEQ ID NO: 13561 - RNA, 22 nt, synthetic construct
  source 1..22: mol_type = other RNA
tagctcatgaaattaggtacaa

SEQ ID NO: 13562 - RNA, 22 nt, synthetic construct
  source 1..22: mol_type = other RNA
agctcatgaaattaggtacaaa

SEQ ID NO: 13563 - RNA, 22 nt, synthetic construct
  source 1..22: mol_type = other RNA
gctcatgaaattaggtacaaag

SEQ ID NO: 13564 - RNA, 22 nt, synthetic construct
  source 1..22: mol_type = other RNA
ggtacaaagtcagagaggggtc

SEQ ID NO: 13565 - RNA, 22 nt, synthetic construct
  source 1..22: mol_type = other RNA
tgttgtttggtaagaacatacc

SEQ ID NO: 13566 - RNA, 22 nt, synthetic construct
  source 1..22: mol_type = other RNA
gttgtttggtaagaacatacct

SEQ ID NO: 13567 - RNA, 22 nt, synthetic construct
  source 1..22: mol_type = other RNA
ttgtttggtaagaacatacctt

SEQ ID NO: 13568 - RNA, 22 nt, synthetic construct
  source 1..22: mol_type = other RNA
tttggtaagaacataccttggg

SEQ ID NO: 13569 - RNA, 22 nt, synthetic construct
  source 1..22: mol_type = other RNA
ggtaagaacataccttgggttg

SEQ ID NO: 13570 - RNA, 22 nt, synthetic construct
  source 1..22: mol_type = other RNA
gtaagaacataccttgggttgg

SEQ ID NO: 13571 - RNA, 22 nt, synthetic construct
  source 1..22: mol_type = other RNA
gttgggcacggtggctcgtgcc

SEQ ID NO: 13572 - RNA, 22 nt, synthetic construct
  source 1..22: mol_type = other RNA
ggcacggtggctcgtgcctgta

SEQ ID NO: 13573 - RNA, 22 nt, synthetic construct
  source 1..22: mol_type = other RNA
ggaggccaaggcaggctgatca

SEQ ID NO: 13574 - RNA, 22 nt, synthetic construct
  source 1..22: mol_type = other RNA
ggagttcaagaccagcctggcc

SEQ ID NO: 13575 - RNA, 22 nt, synthetic construct
  source 1..22: mol_type = other RNA
aagaccagcctggccaacatgg

SEQ ID NO: 13576 - RNA, 22 nt, synthetic construct
  source 1..22: mol_type = other RNA
accaggcatggtggtgtgtgcc

SEQ ID NO: 13577 - RNA, 22 nt, synthetic construct
  source 1..22: mol_type = other RNA
cagtgagctgagatctcaccac

SEQ ID NO: 13578 - RNA, 22 nt, synthetic construct
  source 1..22: mol_type = other RNA
catcccaaaaaataaaaaaata

SEQ ID NO: 13579 - RNA, 22 nt, synthetic construct
  source 1..22: mol_type = other RNA
atccacttaggaacctcagata

SEQ ID NO: 13580 - RNA, 22 nt, synthetic construct
  source 1..22: mol_type = other RNA
ctatgtcccaggcactctacta

SEQ ID NO: 13581 - RNA, 22 nt, synthetic construct
  source 1..22: mol_type = other RNA
agaaaatcagatgggtgtagat

SEQ ID NO: 13582 - RNA, 22 nt, synthetic construct
  source 1..22: mol_type = other RNA
gaaaatcagatgggtgtagatc

SEQ ID NO: 13583 - RNA, 22 nt, synthetic construct
  source 1..22: mol_type = other RNA
gatgggggctattatgaactga

SEQ ID NO: 13584 - RNA, 22 nt, synthetic construct
  source 1..22: mol_type = other RNA
atgggggctattatgaactgag

SEQ ID NO: 13585 - RNA, 22 nt, synthetic construct
  source 1..22: mol_type = other RNA
tgaactgagaaatgaactttga

SEQ ID NO: 13586 - RNA, 22 nt, synthetic construct
  source 1..22: mol_type = other RNA
aaaagtatcttggggccaaatc

SEQ ID NO: 13587 - RNA, 22 nt, synthetic construct
  source 1..22: mol_type = other RNA
aggaatgctatgagtgctgaga

SEQ ID NO: 13588 - RNA, 22 nt, synthetic construct
  source 1..22: mol_type = other RNA
tgagggaaagataccaagtcac

SEQ ID NO: 13589 - RNA, 22 nt, synthetic construct
  source 1..22: mol_type = other RNA
attcttcaaaatggaggtggct

SEQ ID NO: 13590 - RNA, 22 nt, synthetic construct
  source 1..22: mol_type = other RNA
ttcttcaaaatggaggtggctt

SEQ ID NO: 13591 - RNA, 22 nt, synthetic construct
  source 1..22: mol_type = other RNA
ttcaaaatggaggtggcttgtt

SEQ ID NO: 13592 - RNA, 22 nt, synthetic construct
  source 1..22: mol_type = other RNA
ggaaggtggaagctcatttggc

SEQ ID NO: 13593 - RNA, 22 nt, synthetic construct
  source 1..22: mol_type = other RNA
ggccagagtggaaatggaattg

SEQ ID NO: 13594 - RNA, 22 nt, synthetic construct
  source 1..22: mol_type = other RNA
gccagagtggaaatggaattgg

SEQ ID NO: 13595 - RNA, 22 nt, synthetic construct
  source 1..22: mol_type = other RNA
ggagaaatcgatgaccaaatgt

SEQ ID NO: 13596 - RNA, 22 nt, synthetic construct
  source 1..22: mol_type = other RNA
gccccaagtgaaataccctggc

SEQ ID NO: 13597 - RNA, 22 nt, synthetic construct
  source 1..22: mol_type = other RNA
atgtgtcttttcccgatattcc

SEQ ID NO: 13598 - RNA, 22 nt, synthetic construct
  source 1..22: mol_type = other RNA
cccgatattcctcaggtactcc

SEQ ID NO: 13599 - RNA, 22 nt, synthetic construct
  source 1..22: mol_type = other RNA
ccgatattcctcaggtactcca

SEQ ID NO: 13600 - RNA, 22 nt, synthetic construct
  source 1..22: mol_type = other RNA
ctcaggtactccaaagattcag

SEQ ID NO: 13601 - RNA, 22 nt, synthetic construct
  source 1..22: mol_type = other RNA
aggtttactcacgtcatccagc

SEQ ID NO: 13602 - RNA, 22 nt, synthetic construct
  source 1..22: mol_type = other RNA
actcacgtcatccagcagagaa

SEQ ID NO: 13603 - RNA, 22 nt, synthetic construct
  source 1..22: mol_type = other RNA
ctcacgtcatccagcagagaat

SEQ ID NO: 13604 - RNA, 22 nt, synthetic construct
  source 1..22: mol_type = other RNA
cctgaattgctatgtgtctggg

SEQ ID NO: 13605 - RNA, 22 nt, synthetic construct
  source 1..22: mol_type = other RNA
ctgaattgctatgtgtctgggt

SEQ ID NO: 13606 - RNA, 22 nt, synthetic construct
  source 1..22: mol_type = other RNA
ctatgtgtctgggtttcatcca

SEQ ID NO: 13607 - RNA, 22 nt, synthetic construct
  source 1..22: mol_type = other RNA
catccatccgacattgaagttg

SEQ ID NO: 13608 - RNA, 22 nt, synthetic construct
  source 1..22: mol_type = other RNA
atccatccgacattgaagttga

SEQ ID NO: 13609 - RNA, 22 nt, synthetic construct
  source 1..22: mol_type = other RNA
aagttgacttactgaagaatgg

SEQ ID NO: 13610 - RNA, 22 nt, synthetic construct
  source 1..22: mol_type = other RNA
acttactgaagaatggagagag

SEQ ID NO: 13611 - RNA, 22 nt, synthetic construct
  source 1..22: mol_type = other RNA
aaaaagtggagcattcagactt

SEQ ID NO: 13612 - RNA, 22 nt, synthetic construct
  source 1..22: mol_type = other RNA
agacttgtctttcagcaaggac

SEQ ID NO: 13613 - RNA, 22 nt, synthetic construct
  source 1..22: mol_type = other RNA
agcaaggactggtctttctatc

SEQ ID NO: 13614 - RNA, 22 nt, synthetic construct
  source 1..22: mol_type = other RNA
tatctcttgtactacactgaat

SEQ ID NO: 13615 - RNA, 22 nt, synthetic construct
  source 1..22: mol_type = other RNA
acccccactgaaaaagatgagt

SEQ ID NO: 13616 - RNA, 22 nt, synthetic construct
  source 1..22: mol_type = other RNA
tcacagcccaagatagttaagt

SEQ ID NO: 13617 - RNA, 22 nt, synthetic construct
  source 1..22: mol_type = other RNA
agtggggtaagtcttacattct

SEQ ID NO: 13618 - RNA, 22 nt, synthetic construct
  source 1..22: mol_type = other RNA
ttttgtaagctgctgaaagttg

SEQ ID NO: 13619 - RNA, 22 nt, synthetic construct
  source 1..22: mol_type = other RNA
gtaagctgctgaaagttgtgta

SEQ ID NO: 13620 - RNA, 22 nt, synthetic construct
  source 1..22: mol_type = other RNA
taagctgctgaaagttgtgtat

SEQ ID NO: 13621 - RNA, 22 nt, synthetic construct
  source 1..22: mol_type = other RNA
tgtatgagtagtcatatcataa

SEQ ID NO: 13622 - RNA, 22 nt, synthetic construct
  source 1..22: mol_type = other RNA
atataaaaaaggtctatggcca

SEQ ID NO: 13623 - RNA, 22 nt, synthetic construct
  source 1..22: mol_type = other RNA
ggattgtcagggaatgttctta

SEQ ID NO: 13624 - RNA, 22 nt, synthetic construct
  source 1..22: mol_type = other RNA
tcagggaatgttcttaaagatc

SEQ ID NO: 13625 - RNA, 22 nt, synthetic construct
  source 1..22: mol_type = other RNA
ttaaagatcagattagtggcac

SEQ ID NO: 13626 - RNA, 22 nt, synthetic construct
  source 1..22: mol_type = other RNA
gtggcacctgctgagatactga

SEQ ID NO: 13627 - RNA, 22 nt, synthetic construct
  source 1..22: mol_type = other RNA
ctgaaccagtagtttccctgca

SEQ ID NO: 13628 - RNA, 22 nt, synthetic construct
  source 1..22: mol_type = other RNA
tgaaccagtagtttccctgcag

SEQ ID NO: 13629 - RNA, 22 nt, synthetic construct
  source 1..22: mol_type = other RNA
ccctgcagttgagcagggagca

SEQ ID NO: 13630 - RNA, 22 nt, synthetic construct
  source 1..22: mol_type = other RNA
cctgcagttgagcagggagcag

SEQ ID NO: 13631 - RNA, 22 nt, synthetic construct
  source 1..22: mol_type = other RNA
agcagggagcagcagcagcact

SEQ ID NO: 13632 - RNA, 22 nt, synthetic construct
  source 1..22: mol_type = other RNA
gtggcagcttcaggtatattta

SEQ ID NO: 13633 - RNA, 22 nt, synthetic construct
  source 1..22: mol_type = other RNA
tggcagcttcaggtatatttag

SEQ ID NO: 13634 - RNA, 22 nt, synthetic construct
  source 1..22: mol_type = other RNA
agcactgaacgaacatctcaag

SEQ ID NO: 13635 - RNA, 22 nt, synthetic construct
  source 1..22: mol_type = other RNA
gcactgaacgaacatctcaaga

SEQ ID NO: 13636 - RNA, 22 nt, synthetic construct
  source 1..22: mol_type = other RNA
tttgtaagtcctgctgtcctag

SEQ ID NO: 13637 - RNA, 22 nt, synthetic construct
  source 1..22: mol_type = other RNA
gtaagtcctgctgtcctagcat

SEQ ID NO: 13638 - RNA, 22 nt, synthetic construct
  source 1..22: mol_type = other RNA
taagtcctgctgtcctagcatc

SEQ ID NO: 13639 - RNA, 22 nt, synthetic construct
  source 1..22: mol_type = other RNA
tggctggattggtatctgaggc

SEQ ID NO: 13640 - RNA, 22 nt, synthetic construct
  source 1..22: mol_type = other RNA
gtatctgaggctagtaggaagg

SEQ ID NO: 13641 - RNA, 22 nt, synthetic construct
  source 1..22: mol_type = other RNA
ctgctgggtagctctaaacaat

SEQ ID NO: 13642 - RNA, 22 nt, synthetic construct
  source 1..22: mol_type = other RNA
atgggtaggaacagcagcctat

SEQ ID NO: 13643 - RNA, 22 nt, synthetic construct
  source 1..22: mol_type = other RNA
tgccagccttatttctaaccat

SEQ ID NO: 13644 - RNA, 22 nt, synthetic construct
  source 1..22: mol_type = other RNA
ctaaccattttagacatttgtt

SEQ ID NO: 13645 - RNA, 22 nt, synthetic construct
  source 1..22: mol_type = other RNA
taaccattttagacatttgtta

SEQ ID NO: 13646 - RNA, 22 nt, synthetic construct
  source 1..22: mol_type = other RNA
tagacatttgttagtacatggt

SEQ ID NO: 13647 - RNA, 22 nt, synthetic construct
  source 1..22: mol_type = other RNA
agacatttgttagtacatggta

SEQ ID NO: 13648 - RNA, 22 nt, synthetic construct
  source 1..22: mol_type = other RNA
gacatttgttagtacatggtat

SEQ ID NO: 13649 - RNA, 22 nt, synthetic construct
  source 1..22: mol_type = other RNA
gttagtacatggtattttaaaa

SEQ ID NO: 13650 - RNA, 22 nt, synthetic construct
  source 1..22: mol_type = other RNA
ttagtacatggtattttaaaag

SEQ ID NO: 13651 - RNA, 22 nt, synthetic construct
  source 1..22: mol_type = other RNA
gtacatggtattttaaaagtaa

SEQ ID NO: 13652 - RNA, 22 nt, synthetic construct
  source 1..22: mol_type = other RNA
taaaagtaaaacttaatgtctt

SEQ ID NO: 13653 - RNA, 22 nt, synthetic construct
  source 1..22: mol_type = other RNA
aaaagtaaaacttaatgtcttc

SEQ ID NO: 13654 - RNA, 22 nt, synthetic construct
  source 1..22: mol_type = other RNA
aaagtaaaacttaatgtcttcc

SEQ ID NO: 13655 - RNA, 22 nt, synthetic construct
  source 1..22: mol_type = other RNA
ttttctccactgtctttttcat

SEQ ID NO: 13656 - RNA, 22 nt, synthetic construct
  source 1..22: mol_type = other RNA
tttctccactgtctttttcata

SEQ ID NO: 13657 - RNA, 22 nt, synthetic construct
  source 1..22: mol_type = other RNA
ttctccactgtctttttcatag

SEQ ID NO: 13658 - RNA, 22 nt, synthetic construct
  source 1..22: mol_type = other RNA
tctccactgtctttttcataga

SEQ ID NO: 13659 - RNA, 22 nt, synthetic construct
  source 1..22: mol_type = other RNA
ctccactgtctttttcatagat

SEQ ID NO: 13660 - RNA, 22 nt, synthetic construct
  source 1..22: mol_type = other RNA
tccactgtctttttcatagatc

SEQ ID NO: 13661 - RNA, 22 nt, synthetic construct
  source 1..22: mol_type = other RNA
tcatagatcgagacatgtaagc

SEQ ID NO: 13662 - RNA, 22 nt, synthetic construct
  source 1..22: mol_type = other RNA
catagatcgagacatgtaagca

SEQ ID NO: 13663 - RNA, 22 nt, synthetic construct
  source 1..22: mol_type = other RNA
atagatcgagacatgtaagcag

SEQ ID NO: 13664 - RNA, 22 nt, synthetic construct
  source 1..22: mol_type = other RNA
ttgaccttgagaaaatgttttt

SEQ ID NO: 13665 - RNA, 22 nt, synthetic construct
  source 1..22: mol_type = other RNA
cactgtcctgaggactatttat

SEQ ID NO: 13666 - RNA, 22 nt, synthetic construct
  source 1..22: mol_type = other RNA
actgtcctgaggactatttata

SEQ ID NO: 13667 - RNA, 22 nt, synthetic construct
  source 1..22: mol_type = other RNA
atagacagctctaacatgataa

SEQ ID NO: 13668 - RNA, 22 nt, synthetic construct
  source 1..22: mol_type = other RNA
tagacagctctaacatgataac

SEQ ID NO: 13669 - RNA, 22 nt, synthetic construct
  source 1..22: mol_type = other RNA
acagagtaacattttagcaggg

SEQ ID NO: 13670 - RNA, 22 nt, synthetic construct
  source 1..22: mol_type = other RNA
tagcagggaaagaagaatccta

SEQ ID NO: 13671 - RNA, 22 nt, synthetic construct
  source 1..22: mol_type = other RNA
agcagggaaagaagaatcctac

SEQ ID NO: 13672 - RNA, 22 nt, synthetic construct
  source 1..22: mol_type = other RNA
gcagggaaagaagaatcctaca

SEQ ID NO: 13673 - RNA, 22 nt, synthetic construct
  source 1..22: mol_type = other RNA
ccttctcctgtggagtggcatg

SEQ ID NO: 13674 - RNA, 22 nt, synthetic construct
  source 1..22: mol_type = other RNA
ctgaccctctacagagagggca

SEQ ID NO: 13675 - RNA, 22 nt, synthetic construct
  source 1..22: mol_type = other RNA
caggataaaggcaggtggttac

SEQ ID NO: 13676 - RNA, 22 nt, synthetic construct
  source 1..22: mol_type = other RNA
cccacattacctgcaaggcttt

SEQ ID NO: 13677 - RNA, 22 nt, synthetic construct
  source 1..22: mol_type = other RNA
cctgcaaggctttgatctttct

SEQ ID NO: 13678 - RNA, 22 nt, synthetic construct
  source 1..22: mol_type = other RNA
atctttcttctgccatttccac

SEQ ID NO: 13679 - RNA, 22 nt, synthetic construct
  source 1..22: mol_type = other RNA
ttctgccatttccacattggac

SEQ ID NO: 13680 - RNA, 22 nt, synthetic construct
  source 1..22: mol_type = other RNA
ccacattggacatctctgctga

SEQ ID NO: 13681 - RNA, 22 nt, synthetic construct
  source 1..22: mol_type = other RNA
cacattggacatctctgctgag

SEQ ID NO: 13682 - RNA, 22 nt, synthetic construct
  source 1..22: mol_type = other RNA
gacatctctgctgaggagagaa

SEQ ID NO: 13683 - RNA, 22 nt, synthetic construct
  source 1..22: mol_type = other RNA
cctttgtataatgttgttttat

SEQ ID NO: 13684 - RNA, 22 nt, synthetic construct
  source 1..22: mol_type = other RNA
ctttgtataatgttgttttatt

SEQ ID NO: 13685 - RNA, 22 nt, synthetic construct
  source 1..22: mol_type = other RNA
tataatgttgttttattcttca

SEQ ID NO: 13686 - RNA, 22 nt, synthetic construct
  source 1..22: mol_type = other RNA
ttttattcttcagacagaagag

SEQ ID NO: 13687 - RNA, 22 nt, synthetic construct
  source 1..22: mol_type = other RNA
tattcttcagacagaagagagg

SEQ ID NO: 13688 - RNA, 22 nt, synthetic construct
  source 1..22: mol_type = other RNA
attcttcagacagaagagagga

SEQ ID NO: 13689 - RNA, 22 nt, synthetic construct
  source 1..22: mol_type = other RNA
ttcttcagacagaagagaggag

SEQ ID NO: 13690 - RNA, 22 nt, synthetic construct
  source 1..22: mol_type = other RNA
ttcagacagaagagaggagtta

SEQ ID NO: 13691 - RNA, 22 nt, synthetic construct
  source 1..22: mol_type = other RNA
tacagctctgcagacatcccat

SEQ ID NO: 13692 - RNA, 22 nt, synthetic construct
  source 1..22: mol_type = other RNA
ctgtatggggactgtgtttgcc

SEQ ID NO: 13693 - RNA, 22 nt, synthetic construct
  source 1..22: mol_type = other RNA
gcctcttagaggttcccaggcc

SEQ ID NO: 13694 - RNA, 22 nt, synthetic construct
  source 1..22: mol_type = other RNA
cctcttagaggttcccaggcca

SEQ ID NO: 13695 - RNA, 22 nt, synthetic construct
  source 1..22: mol_type = other RNA
ccaggccactagaggagataaa

SEQ ID NO: 13696 - RNA, 22 nt, synthetic construct
  source 1..22: mol_type = other RNA
ttataacttgatataatgatac

SEQ ID NO: 13697 - RNA, 22 nt, synthetic construct
  source 1..22: mol_type = other RNA
taacttgatataatgatactat

SEQ ID NO: 13698 - RNA, 22 nt, synthetic construct
  source 1..22: mol_type = other RNA
gttggagtccaaaggcttttca

SEQ ID NO: 13699 - RNA, 22 nt, synthetic construct
  source 1..22: mol_type = other RNA
gagtccaaaggcttttcaatga

SEQ ID NO: 13700 - RNA, 22 nt, synthetic construct
  source 1..22: mol_type = other RNA
caatgaaattctactgcccagg

SEQ ID NO: 13701 - RNA, 22 nt, synthetic construct
  source 1..22: mol_type = other RNA
aatgaaattctactgcccaggg

SEQ ID NO: 13702 - RNA, 22 nt, synthetic construct
  source 1..22: mol_type = other RNA
tactgcccagggtacattgatg

SEQ ID NO: 13703 - RNA, 22 nt, synthetic construct
  source 1..22: mol_type = other RNA
atgctgaaaccccattcaaatc

SEQ ID NO: 13704 - RNA, 22 nt, synthetic construct
  source 1..22: mol_type = other RNA
aaatctcctgttatattctaga

SEQ ID NO: 13705 - RNA, 22 nt, synthetic construct
  source 1..22: mol_type = other RNA
tattctagaacagggaattgat

SEQ ID NO: 13706 - RNA, 22 nt, synthetic construct
  source 1..22: mol_type = other RNA
tagaacagggaattgatttggg

SEQ ID NO: 13707 - RNA, 22 nt, synthetic construct
  source 1..22: mol_type = other RNA
atttgggagagcatcaggaagg

SEQ ID NO: 13708 - RNA, 22 nt, synthetic construct
  source 1..22: mol_type = other RNA
gggagagcatcaggaaggtgga

SEQ ID NO: 13709 - RNA, 22 nt, synthetic construct
  source 1..22: mol_type = other RNA
ggagagcatcaggaaggtggat

SEQ ID NO: 13710 - RNA, 22 nt, synthetic construct
  source 1..22: mol_type = other RNA
gtaaattgtagagccaggacct

SEQ ID NO: 13711 - RNA, 22 nt, synthetic construct
  source 1..22: mol_type = other RNA
tagagccaggacctgaactcta

SEQ ID NO: 13712 - RNA, 22 nt, synthetic construct
  source 1..22: mol_type = other RNA
cttaatgacggggacatgttct

SEQ ID NO: 13713 - RNA, 22 nt, synthetic construct
  source 1..22: mol_type = other RNA
tgagaaatgcttacacaaacct

SEQ ID NO: 13714 - RNA, 22 nt, synthetic construct
  source 1..22: mol_type = other RNA
tagcctactacacgcataggct

SEQ ID NO: 13715 - RNA, 22 nt, synthetic construct
  source 1..22: mol_type = other RNA
ctcctagactacaaacctgtac

SEQ ID NO: 13716 - RNA, 22 nt, synthetic construct
  source 1..22: mol_type = other RNA
ctgtactgaatactgtgggcag

SEQ ID NO: 13717 - RNA, 22 nt, synthetic construct
  source 1..22: mol_type = other RNA
taacacaatggtaagtatttgt

SEQ ID NO: 13718 - RNA, 22 nt, synthetic construct
  source 1..22: mol_type = other RNA
gtgtatctaaacatagaagttg

SEQ ID NO: 13719 - RNA, 22 nt, synthetic construct
  source 1..22: mol_type = other RNA
tgtatctaaacatagaagttgc

SEQ ID NO: 13720 - RNA, 22 nt, synthetic construct
  source 1..22: mol_type = other RNA
cagtaaaaatatgctattttaa

SEQ ID NO: 13721 - RNA, 22 nt, synthetic construct
  source 1..22: mol_type = other RNA
taatcttatgagaccactgtca

SEQ ID NO: 13722 - RNA, 22 nt, synthetic construct
  source 1..22: mol_type = other RNA
aatcttatgagaccactgtcat

SEQ ID NO: 13723 - RNA, 22 nt, synthetic construct
  source 1..22: mol_type = other RNA
atcttatgagaccactgtcata

SEQ ID NO: 13724 - RNA, 22 nt, synthetic construct
  source 1..22: mol_type = other RNA
accaaaacatcatatcagcatt

SEQ ID NO: 13725 - RNA, 22 nt, synthetic construct
  source 1..22: mol_type = other RNA
tttcttctaagattttgggagc

SEQ ID NO: 13726 - RNA, 22 nt, synthetic construct
  source 1..22: mol_type = other RNA
ttcttctaagattttgggagca

SEQ ID NO: 13727 - RNA, 22 nt, synthetic construct
  source 1..22: mol_type = other RNA
tcttctaagattttgggagcac

SEQ ID NO: 13728 - RNA, 22 nt, synthetic construct
  source 1..22: mol_type = other RNA
cttctaagattttgggagcacc

SEQ ID NO: 13729 - RNA, 22 nt, synthetic construct
  source 1..22: mol_type = other RNA
ttctaagattttgggagcacca

SEQ ID NO: 13730 - RNA, 22 nt, synthetic construct
  source 1..22: mol_type = other RNA
tgggagcaccaaagggatacac

SEQ ID NO: 13731 - RNA, 22 nt, synthetic construct
  source 1..22: mol_type = other RNA
gggagcaccaaagggatacact

SEQ ID NO: 13732 - RNA, 22 nt, synthetic construct
  source 1..22: mol_type = other RNA
ggagcaccaaagggatacacta

SEQ ID NO: 13733 - RNA, 22 nt, synthetic construct
  source 1..22: mol_type = other RNA
taatgggtttggagaactgtct

SEQ ID NO: 13734 - RNA, 22 nt, synthetic construct
  source 1..22: mol_type = other RNA
ggagaactgtctgcagctactt

SEQ ID NO: 13735 - RNA, 22 nt, synthetic construct
  source 1..22: mol_type = other RNA
gagaactgtctgcagctacttc

SEQ ID NO: 13736 - RNA, 22 nt, synthetic construct
  source 1..22: mol_type = other RNA
aaaaaggtgatctacacagtag

SEQ ID NO: 13737 - RNA, 22 nt, synthetic construct
  source 1..22: mol_type = other RNA
aaaaggtgatctacacagtaga

SEQ ID NO: 13738 - RNA, 22 nt, synthetic construct
  source 1..22: mol_type = other RNA
gacaagtttggtaatgagatct

SEQ ID NO: 13739 - RNA, 22 nt, synthetic construct
  source 1..22: mol_type = other RNA
ggtaatgagatctgcaatccaa

SEQ ID NO: 13740 - RNA, 22 nt, synthetic construct
  source 1..22: mol_type = other RNA
gtaatgagatctgcaatccaaa

SEQ ID NO: 13741 - RNA, 22 nt, synthetic construct
  source 1..22: mol_type = other RNA
attgctaacctttttcttttct

SEQ ID NO: 13742 - RNA, 22 nt, synthetic construct
  source 1..22: mol_type = other RNA
ctaacctttttcttttcttttc

SEQ ID NO: 13743 - RNA, 22 nt, synthetic construct
  source 1..22: mol_type = other RNA
tcttttcttttcaggtttgaag

SEQ ID NO: 13744 - RNA, 22 nt, synthetic construct
  source 1..22: mol_type = other RNA
cttttcttttcaggtttgaaga

SEQ ID NO: 13745 - RNA, 22 nt, synthetic construct
  source 1..22: mol_type = other RNA
ttttcttttcaggtttgaagat

SEQ ID NO: 13746 - RNA, 22 nt, synthetic construct
  source 1..22: mol_type = other RNA
cttttcaggtttgaagatgccg

SEQ ID NO: 13747 - RNA, 22 nt, synthetic construct
  source 1..22: mol_type = other RNA
ttttcaggtttgaagatgccgc

SEQ ID NO: 13748 - RNA, 22 nt, synthetic construct
  source 1..22: mol_type = other RNA
caggtttgaagatgccgcattt

SEQ ID NO: 13749 - RNA, 22 nt, synthetic construct
  source 1..22: mol_type = other RNA
aggtttgaagatgccgcatttg

SEQ ID NO: 13750 - RNA, 22 nt, synthetic construct
  source 1..22: mol_type = other RNA
gaagatgccgcatttggattgg

SEQ ID NO: 13751 - RNA, 22 nt, synthetic construct
  source 1..22: mol_type = other RNA
aagatgccgcatttggattgga

SEQ ID NO: 13752 - RNA, 22 nt, synthetic construct
  source 1..22: mol_type = other RNA
ggattggatgaattccaaattc

SEQ ID NO: 13753 - RNA, 22 nt, synthetic construct
  source 1..22: mol_type = other RNA
gattggatgaattccaaattct

SEQ ID NO: 13754 - RNA, 22 nt, synthetic construct
  source 1..22: mol_type = other RNA
gatgaattccaaattctgcttg

SEQ ID NO: 13755 - RNA, 22 nt, synthetic construct
  source 1..22: mol_type = other RNA
caaattctgcttgcttgctttt

SEQ ID NO: 13756 - RNA, 22 nt, synthetic construct
  source 1..22: mol_type = other RNA
tgcttgcttgctttttaatatt

SEQ ID NO: 13757 - RNA, 22 nt, synthetic construct
  source 1..22: mol_type = other RNA
taatattgatatgcttatacac

SEQ ID NO: 13758 - RNA, 22 nt, synthetic construct
  source 1..22: mol_type = other RNA
aatattgatatgcttatacact

SEQ ID NO: 13759 - RNA, 22 nt, synthetic construct
  source 1..22: mol_type = other RNA
atattgatatgcttatacactt

SEQ ID NO: 13760 - RNA, 22 nt, synthetic construct
  source 1..22: mol_type = other RNA
atatgcttatacacttacactt

SEQ ID NO: 13761 - RNA, 22 nt, synthetic construct
  source 1..22: mol_type = other RNA
tgcacaaaatgtagggttataa

SEQ ID NO: 13762 - RNA, 22 nt, synthetic construct
  source 1..22: mol_type = other RNA
taataatgttaacatggacatg

SEQ ID NO: 13763 - RNA, 22 nt, synthetic construct
  source 1..22: mol_type = other RNA
acatggacatgatcttctttat

SEQ ID NO: 13764 - RNA, 22 nt, synthetic construct
  source 1..22: mol_type = other RNA
taattctactttgagtgctgtc

SEQ ID NO: 13765 - RNA, 22 nt, synthetic construct
  source 1..22: mol_type = other RNA
tactttgagtgctgtctccatg

SEQ ID NO: 13766 - RNA, 22 nt, synthetic construct
  source 1..22: mol_type = other RNA
agtgctgtctccatgtttgatg

SEQ ID NO: 13767 - RNA, 22 nt, synthetic construct
  source 1..22: mol_type = other RNA
gatgtatctgagcaggttgctc

SEQ ID NO: 13768 - RNA, 22 nt, synthetic construct
  source 1..22: mol_type = other RNA
atgtatctgagcaggttgctcc

SEQ ID NO: 13769 - RNA, 22 nt, synthetic construct
  source 1..22: mol_type = other RNA
ctccacaggtagctctaggagg

SEQ ID NO: 13770 - RNA, 22 nt, synthetic construct
  source 1..22: mol_type = other RNA
tcttatccaacatcaacatctt

SEQ ID NO: 13771 - RNA, 22 nt, synthetic construct
  source 1..22: mol_type = other RNA
gaactcttcaatctcttgcact

SEQ ID NO: 13772 - RNA, 22 nt, synthetic construct
  source 1..22: mol_type = other RNA
aactcttcaatctcttgcactc

SEQ ID NO: 13773 - RNA, 22 nt, synthetic construct
  source 1..22: mol_type = other RNA
agatagttaagcgtgcataagt

SEQ ID NO: 13774 - RNA, 22 nt, synthetic construct
  source 1..22: mol_type = other RNA
agcgtgcataagttaacttcca

SEQ ID NO: 13775 - RNA, 22 nt, synthetic construct
  source 1..22: mol_type = other RNA
acttccaatttacatactctgc

SEQ ID NO: 13776 - RNA, 22 nt, synthetic construct
  source 1..22: mol_type = other RNA
acatactctgcttagaatttgg

SEQ ID NO: 13777 - RNA, 22 nt, synthetic construct
  source 1..22: mol_type = other RNA
catactctgcttagaatttggg

SEQ ID NO: 13778 - RNA, 22 nt, synthetic construct
  source 1..22: mol_type = other RNA
gggggaaaatttagaaatataa

SEQ ID NO: 13779 - RNA, 22 nt, synthetic construct
  source 1..22: mol_type = other RNA
ggggaaaatttagaaatataat

SEQ ID NO: 13780 - RNA, 22 nt, synthetic construct
  source 1..22: mol_type = other RNA
agaaatataattgacaggatta

SEQ ID NO: 13781 - RNA, 22 nt, synthetic construct
  source 1..22: mol_type = other RNA
gaaatataattgacaggattat

SEQ ID NO: 13782 - RNA, 22 nt, synthetic construct
  source 1..22: mol_type = other RNA
acaggattattggaaatttgtt

SEQ ID NO: 13783 - RNA, 22 nt, synthetic construct
  source 1..22: mol_type = other RNA
ttggaaatttgttataatgaat

SEQ ID NO: 13784 - RNA, 22 nt, synthetic construct
  source 1..22: mol_type = other RNA
gaaatttgttataatgaatgaa

SEQ ID NO: 13785 - RNA, 22 nt, synthetic construct
  source 1..22: mol_type = other RNA
gttataatgaatgaaacatttt

SEQ ID NO: 13786 - RNA, 22 nt, synthetic construct
  source 1..22: mol_type = other RNA
ttataatgaatgaaacattttg

SEQ ID NO: 13787 - RNA, 22 nt, synthetic construct
  source 1..22: mol_type = other RNA
taatgaatgaaacattttgtca

SEQ ID NO: 13788 - RNA, 22 nt, synthetic construct
  source 1..22: mol_type = other RNA
tgtcatataagattcatattta

SEQ ID NO: 13789 - RNA, 22 nt, synthetic construct
  source 1..22: mol_type = other RNA
gtcatataagattcatatttac

SEQ ID NO: 13790 - RNA, 22 nt, synthetic construct
  source 1..22: mol_type = other RNA
tcatataagattcatatttact

SEQ ID NO: 13791 - RNA, 22 nt, synthetic construct
  source 1..22: mol_type = other RNA
atatttacttcttatacatttg

SEQ ID NO: 13792 - RNA, 22 nt, synthetic construct
  source 1..22: mol_type = other RNA
acttcttatacatttgataaag

SEQ ID NO: 13793 - RNA, 22 nt, synthetic construct
  source 1..22: mol_type = other RNA
cttcttatacatttgataaagt

SEQ ID NO: 13794 - RNA, 22 nt, synthetic construct
  source 1..22: mol_type = other RNA
gataaagtaaggcatggttgtg

SEQ ID NO: 13795 - RNA, 22 nt, synthetic construct
  source 1..22: mol_type = other RNA
ataaagtaaggcatggttgtgg

SEQ ID NO: 13796 - RNA, 22 nt, synthetic construct
  source 1..22: mol_type = other RNA
tggttaatctggtttatttttg

SEQ ID NO: 13797 - RNA, 22 nt, synthetic construct
  source 1..22: mol_type = other RNA
atctggtttatttttgttccac

SEQ ID NO: 13798 - RNA, 22 nt, synthetic construct
  source 1..22: mol_type = other RNA
atttttgttccacaagttaaat

SEQ ID NO: 13799 - RNA, 22 nt, synthetic construct
  source 1..22: mol_type = other RNA
tttttgttccacaagttaaata

SEQ ID NO: 13800 - RNA, 22 nt, synthetic construct
  source 1..22: mol_type = other RNA
ttgttccacaagttaaataaat

SEQ ID NO: 13801 - RNA, 22 nt, synthetic construct
  source 1..22: mol_type = other RNA
tgttccacaagttaaataaatc

SEQ ID NO: 13802 - RNA, 22 nt, synthetic construct
  source 1..22: mol_type = other RNA
gttccacaagttaaataaatca

SEQ ID NO: 13803 - RNA, 22 nt, synthetic construct
  source 1..22: mol_type = other RNA
ttccacaagttaaataaatcat

SEQ ID NO: 13804 - RNA, 22 nt, synthetic construct
  source 1..22: mol_type = other RNA
cacaagttaaataaatcataaa

SEQ ID NO: 13805 - RNA, 22 nt, synthetic construct
  source 1..22: mol_type = other RNA
aataaatcataaaacttgatgt

SEQ ID NO: 13806 - RNA, 22 nt, synthetic construct
  source 1..22: mol_type = other RNA
tctcttatatctcactcccact

SEQ ID NO: 13807 - RNA, 22 nt, synthetic construct
  source 1..22: mol_type = other RNA
cccctttattttcaaacaggga

SEQ ID NO: 13808 - RNA, 22 nt, synthetic construct
  source 1..22: mol_type = other RNA
ttttcaaacagggaaacagtct

SEQ ID NO: 13809 - RNA, 22 nt, synthetic construct
  source 1..22: mol_type = other RNA
tcaaacagggaaacagtcttca

SEQ ID NO: 13810 - RNA, 22 nt, synthetic construct
  source 1..22: mol_type = other RNA
caaacagggaaacagtcttcaa

SEQ ID NO: 13811 - RNA, 22 nt, synthetic construct
  source 1..22: mol_type = other RNA
aaacagggaaacagtcttcaag

SEQ ID NO: 13812 - RNA, 22 nt, synthetic construct
  source 1..22: mol_type = other RNA
cacttggtaaaaaatgtgaacc

SEQ ID NO: 13813 - RNA, 22 nt, synthetic construct
  source 1..22: mol_type = other RNA
ggctcacagtgtaaagggcctc

SEQ ID NO: 13814 - RNA, 22 nt, synthetic construct
  source 1..22: mol_type = other RNA
gctcacagtgtaaagggcctca

SEQ ID NO: 13815 - RNA, 22 nt, synthetic construct
  source 1..22: mol_type = other RNA
acattttccagattaggaatct

SEQ ID NO: 13816 - RNA, 22 nt, synthetic construct
  source 1..22: mol_type = other RNA
tccagattaggaatctgatgct

SEQ ID NO: 13817 - RNA, 22 nt, synthetic construct
  source 1..22: mol_type = other RNA
ccagattaggaatctgatgctc

SEQ ID NO: 13818 - RNA, 22 nt, synthetic construct
  source 1..22: mol_type = other RNA
cagattaggaatctgatgctca

SEQ ID NO: 13819 - RNA, 22 nt, synthetic construct
  source 1..22: mol_type = other RNA
ggaatctgatgctcaaagaagt

SEQ ID NO: 13820 - RNA, 22 nt, synthetic construct
  source 1..22: mol_type = other RNA
aatggcatagttggggtgacac

SEQ ID NO: 13821 - RNA, 22 nt, synthetic construct
  source 1..22: mol_type = other RNA
gggtgacacagctgtctagtgg

SEQ ID NO: 13822 - RNA, 22 nt, synthetic construct
  source 1..22: mol_type = other RNA
tagccagcgttctttcctgcgg

SEQ ID NO: 13823 - RNA, 22 nt, synthetic construct
  source 1..22: mol_type = other RNA
agccagcgttctttcctgcggg

SEQ ID NO: 13824 - RNA, 22 nt, synthetic construct
  source 1..22: mol_type = other RNA
gccagcgttctttcctgcgggc

SEQ ID NO: 13825 - RNA, 22 nt, synthetic construct
  source 1..22: mol_type = other RNA
tttcctgcgggccaggtcatga

SEQ ID NO: 13826 - RNA, 22 nt, synthetic construct
  source 1..22: mol_type = other RNA
ctgcgggccaggtcatgaggag

SEQ ID NO: 13827 - RNA, 22 nt, synthetic construct
  source 1..22: mol_type = other RNA
aatattttagcaaggaatagat

SEQ ID NO: 13828 - RNA, 22 nt, synthetic construct
  source 1..22: mol_type = other RNA
atattttagcaaggaatagata

SEQ ID NO: 13829 - RNA, 22 nt, synthetic construct
  source 1..22: mol_type = other RNA
tagcaaggaatagatatacaat

SEQ ID NO: 13830 - RNA, 22 nt, synthetic construct
  source 1..22: mol_type = other RNA
agcaaggaatagatatacaatc

SEQ ID NO: 13831 - RNA, 22 nt, synthetic construct
  source 1..22: mol_type = other RNA
gcaaggaatagatatacaatca

SEQ ID NO: 13832 - RNA, 22 nt, synthetic construct
  source 1..22: mol_type = other RNA
gtttcaggaccccttcttggac

SEQ ID NO: 13833 - RNA, 22 nt, synthetic construct
  source 1..22: mol_type = other RNA
caggaccccttcttggacacca

SEQ ID NO: 13834 - RNA, 22 nt, synthetic construct
  source 1..22: mol_type = other RNA
aggaccccttcttggacaccaa

SEQ ID NO: 13835 - RNA, 22 nt, synthetic construct
  source 1..22: mol_type = other RNA
aagtcccttctataaaatggta

SEQ ID NO: 13836 - RNA, 22 nt, synthetic construct
  source 1..22: mol_type = other RNA
agtcccttctataaaatggtat

SEQ ID NO: 13837 - RNA, 22 nt, synthetic construct
  source 1..22: mol_type = other RNA
gcatataacctatccacatcct

SEQ ID NO: 13838 - RNA, 22 nt, synthetic construct
  source 1..22: mol_type = other RNA
catataacctatccacatcctc

SEQ ID NO: 13839 - RNA, 22 nt, synthetic construct
  source 1..22: mol_type = other RNA
aatcatttctagattacttgta

SEQ ID NO: 13840 - RNA, 22 nt, synthetic construct
  source 1..22: mol_type = other RNA
ctagattacttgtaatacctaa

SEQ ID NO: 13841 - RNA, 22 nt, synthetic construct
  source 1..22: mol_type = other RNA
tagattacttgtaatacctaat

SEQ ID NO: 13842 - RNA, 22 nt, synthetic construct
  source 1..22: mol_type = other RNA
cttgtaatacctaatacaatgt

SEQ ID NO: 13843 - RNA, 22 nt, synthetic construct
  source 1..22: mol_type = other RNA
ttattgtttaaggaataatgac

SEQ ID NO: 13844 - RNA, 22 nt, synthetic construct
  source 1..22: mol_type = other RNA
ttgtttaaggaataatgacaag

SEQ ID NO: 13845 - RNA, 22 nt, synthetic construct
  source 1..22: mol_type = other RNA
tttaaggaataatgacaagaaa

SEQ ID NO: 13846 - RNA, 22 nt, synthetic construct
  source 1..22: mol_type = other RNA
aaggaataatgacaagaaaaaa

SEQ ID NO: 13847 - RNA, 22 nt, synthetic construct
  source 1..22: mol_type = other RNA
aggaataatgacaagaaaaaaa

SEQ ID NO: 13848 - RNA, 22 nt, synthetic construct
  source 1..22: mol_type = other RNA
tttccccagtgtttttgatcca

SEQ ID NO: 13849 - RNA, 22 nt, synthetic construct
  source 1..22: mol_type = other RNA
ttccccagtgtttttgatccat

SEQ ID NO: 13850 - RNA, 22 nt, synthetic construct
  source 1..22: mol_type = other RNA
tccccagtgtttttgatccatg

SEQ ID NO: 13851 - RNA, 22 nt, synthetic construct
  source 1..22: mol_type = other RNA
ccccagtgtttttgatccatgg

SEQ ID NO: 13852 - RNA, 22 nt, synthetic construct
  source 1..22: mol_type = other RNA
cccagtgtttttgatccatggt

SEQ ID NO: 13853 - RNA, 22 nt, synthetic construct
  source 1..22: mol_type = other RNA
ttgatccatggtttgctgaatc

SEQ ID NO: 13854 - RNA, 22 nt, synthetic construct
  source 1..22: mol_type = other RNA
tgatccatggtttgctgaatcc

SEQ ID NO: 13855 - RNA, 22 nt, synthetic construct
  source 1..22: mol_type = other RNA
gatccatggtttgctgaatcca

SEQ ID NO: 13856 - RNA, 22 nt, synthetic construct
  source 1..22: mol_type = other RNA
atccatggtttgctgaatccac

SEQ ID NO: 13857 - RNA, 22 nt, synthetic construct
  source 1..22: mol_type = other RNA
gctgaatccacagatgtggagc

SEQ ID NO: 13858 - RNA, 22 nt, synthetic construct
  source 1..22: mol_type = other RNA
ctgaatccacagatgtggagcc

SEQ ID NO: 13859 - RNA, 22 nt, synthetic construct
  source 1..22: mol_type = other RNA
aatgacaaataacagatttaaa

SEQ ID NO: 13860 - RNA, 22 nt, synthetic construct
  source 1..22: mol_type = other RNA
atggcagcccttggagtcaggg

SEQ ID NO: 13861 - RNA, 22 nt, synthetic construct
  source 1..22: mol_type = other RNA
ttcatggcagcccttggagtca

SEQ ID NO: 13862 - RNA, 22 nt, synthetic construct
  source 1..22: mol_type = other RNA
tcacctgagtcaggatggcctg

SEQ ID NO: 13863 - RNA, 22 nt, synthetic construct
  source 1..22: mol_type = other RNA
tccaagagggcctgcaccaggc

SEQ ID NO: 13864 - RNA, 22 nt, synthetic construct
  source 1..22: mol_type = other RNA
cctggagaggaggtcctccttc

SEQ ID NO: 13865 - RNA, 22 nt, synthetic construct
  source 1..22: mol_type = other RNA
tctagtagggtcaaagagatct

SEQ ID NO: 13866 - RNA, 22 nt, synthetic construct
  source 1..22: mol_type = other RNA
aaagtgatgccaacttaccacc

SEQ ID NO: 13867 - RNA, 22 nt, synthetic construct
  source 1..22: mol_type = other RNA
tccttgattaaaagtgatgcca

SEQ ID NO: 13868 - RNA, 22 nt, synthetic construct
  source 1..22: mol_type = other RNA
ctccttgattaaaagtgatgcc

SEQ ID NO: 13869 - RNA, 22 nt, synthetic construct
  source 1..22: mol_type = other RNA
agagaggagggaaaatccttga

SEQ ID NO: 13870 - RNA, 22 nt, synthetic construct
  source 1..22: mol_type = other RNA
acttccctttcagagaggaggg

SEQ ID NO: 13871 - RNA, 22 nt, synthetic construct
  source 1..22: mol_type = other RNA
tcaccagtctgccttcccattg

SEQ ID NO: 13872 - RNA, 22 nt, synthetic construct
  source 1..22: mol_type = other RNA
ctcaccagtctgccttcccatt

SEQ ID NO: 13873 - RNA, 22 nt, synthetic construct
  source 1..22: mol_type = other RNA
actgctcctgccagctcactag

SEQ ID NO: 13874 - RNA, 22 nt, synthetic construct
  source 1..22: mol_type = other RNA
cactgctcctgccagctcacta

SEQ ID NO: 13875 - RNA, 22 nt, synthetic construct
  source 1..22: mol_type = other RNA
tcactgctcctgccagctcact

SEQ ID NO: 13876 - RNA, 22 nt, synthetic construct
  source 1..22: mol_type = other RNA
gctccagcacacccagcaacag

SEQ ID NO: 13877 - RNA, 22 nt, synthetic construct
  source 1..22: mol_type = other RNA
cttccagcagagtgggaagcac

SEQ ID NO: 13878 - RNA, 22 nt, synthetic construct
  source 1..22: mol_type = other RNA
gctgcgtgcccctgggatggtt

SEQ ID NO: 13879 - RNA, 22 nt, synthetic construct
  source 1..22: mol_type = other RNA
ggctgcgtgcccctgggatggt

SEQ ID NO: 13880 - RNA, 22 nt, synthetic construct
  source 1..22: mol_type = other RNA
gtgtatcgtcagggctcaggga

SEQ ID NO: 13881 - RNA, 22 nt, synthetic construct
  source 1..22: mol_type = other RNA
atgttggtgtatcgtcagggct

SEQ ID NO: 13882 - RNA, 22 nt, synthetic construct
  source 1..22: mol_type = other RNA
aaggcaggagctgatctgtcca

SEQ ID NO: 13883 - RNA, 22 nt, synthetic construct
  source 1..22: mol_type = other RNA
tgcctgcatccatcttccccac

SEQ ID NO: 13884 - RNA, 22 nt, synthetic construct
  source 1..22: mol_type = other RNA
actcacactgattgtgcctgca

SEQ ID NO: 13885 - RNA, 22 nt, synthetic construct
  source 1..22: mol_type = other RNA
gactcacactgattgtgcctgc

SEQ ID NO: 13886 - RNA, 22 nt, synthetic construct
  source 1..22: mol_type = other RNA
tgactcacactgattgtgcctg

SEQ ID NO: 13887 - RNA, 22 nt, synthetic construct
  source 1..22: mol_type = other RNA
tctcattttgactcacactgat

SEQ ID NO: 13888 - RNA, 22 nt, synthetic construct
  source 1..22: mol_type = other RNA
ctctcattttgactcacactga

SEQ ID NO: 13889 - RNA, 22 nt, synthetic construct
  source 1..22: mol_type = other RNA
caggcgtgagccagtgcacccg

SEQ ID NO: 13890 - RNA, 22 nt, synthetic construct
  source 1..22: mol_type = other RNA
gccaggctggtgtcgaactgat

SEQ ID NO: 13891 - RNA, 22 nt, synthetic construct
  source 1..22: mol_type = other RNA
ccatgttggccaggctggtgtc

SEQ ID NO: 13892 - RNA, 22 nt, synthetic construct
  source 1..22: mol_type = other RNA
gccatgttggccaggctggtgt

SEQ ID NO: 13893 - RNA, 22 nt, synthetic construct
  source 1..22: mol_type = other RNA
tgccatgttggccaggctggtg

SEQ ID NO: 13894 - RNA, 22 nt, synthetic construct
  source 1..22: mol_type = other RNA
gtagagacagggttttgccatg

SEQ ID NO: 13895 - RNA, 22 nt, synthetic construct
  source 1..22: mol_type = other RNA
agtagagacagggttttgccat

SEQ ID NO: 13896 - RNA, 22 nt, synthetic construct
  source 1..22: mol_type = other RNA
tagtagagacagggttttgcca

SEQ ID NO: 13897 - RNA, 22 nt, synthetic construct
  source 1..22: mol_type = other RNA
ttagtagagacagggttttgcc

SEQ ID NO: 13898 - RNA, 22 nt, synthetic construct
  source 1..22: mol_type = other RNA
tttagtagagacagggttttgc

SEQ ID NO: 13899 - RNA, 22 nt, synthetic construct
  source 1..22: mol_type = other RNA
tattttttagtagagacagggt

SEQ ID NO: 13900 - RNA, 22 nt, synthetic construct
  source 1..22: mol_type = other RNA
gtattttttagtagagacaggg

SEQ ID NO: 13901 - RNA, 22 nt, synthetic construct
  source 1..22: mol_type = other RNA
tgtattttttagtagagacagg

SEQ ID NO: 13902 - RNA, 22 nt, synthetic construct
  source 1..22: mol_type = other RNA
ttgtattttttagtagagacag

SEQ ID NO: 13903 - RNA, 22 nt, synthetic construct
  source 1..22: mol_type = other RNA
tttgtattttttagtagagaca

SEQ ID NO: 13904 - RNA, 22 nt, synthetic construct
  source 1..22: mol_type = other RNA
tcctgcctcagcctcctgagta

SEQ ID NO: 13905 - RNA, 22 nt, synthetic construct
  source 1..22: mol_type = other RNA
aagcaattctcctgcctcagcc

SEQ ID NO: 13906 - RNA, 22 nt, synthetic construct
  source 1..22: mol_type = other RNA
caacctctgccttcccagttca

SEQ ID NO: 13907 - RNA, 22 nt, synthetic construct
  source 1..22: mol_type = other RNA
cccagactggagtgcagtagcg

SEQ ID NO: 13908 - RNA, 22 nt, synthetic construct
  source 1..22: mol_type = other RNA
agatggagtcttgctctgttgc

SEQ ID NO: 13909 - RNA, 22 nt, synthetic construct
  source 1..22: mol_type = other RNA
gagatggagtcttgctctgttg

SEQ ID NO: 13910 - RNA, 22 nt, synthetic construct
  source 1..22: mol_type = other RNA
tgagatggagtcttgctctgtt

SEQ ID NO: 13911 - RNA, 22 nt, synthetic construct
  source 1..22: mol_type = other RNA
ttgagatggagtcttgctctgt

SEQ ID NO: 13912 - RNA, 22 nt, synthetic construct
  source 1..22: mol_type = other RNA
tttgagatggagtcttgctctg

SEQ ID NO: 13913 - RNA, 22 nt, synthetic construct
  source 1..22: mol_type = other RNA
ttttgagatggagtcttgctct

SEQ ID NO: 13914 - RNA, 22 nt, synthetic construct
  source 1..22: mol_type = other RNA
tttttgagatggagtcttgctc

SEQ ID NO: 13915 - RNA, 22 nt, synthetic construct
  source 1..22: mol_type = other RNA
ttttttgagatggagtcttgct

SEQ ID NO: 13916 - RNA, 22 nt, synthetic construct
  source 1..22: mol_type = other RNA
tttttttgagatggagtcttgc

SEQ ID NO: 13917 - RNA, 22 nt, synthetic construct
  source 1..22: mol_type = other RNA
ttttttttgagatggagtcttg

SEQ ID NO: 13918 - RNA, 22 nt, synthetic construct
  source 1..22: mol_type = other RNA
tctatttttttttttgagatgg

SEQ ID NO: 13919 - RNA, 22 nt, synthetic construct
  source 1..22: mol_type = other RNA
ctctatttttttttttgagatg

SEQ ID NO: 13920 - RNA, 22 nt, synthetic construct
  source 1..22: mol_type = other RNA
tctgcaccccatttctctattt

SEQ ID NO: 13921 - RNA, 22 nt, synthetic construct
  source 1..22: mol_type = other RNA
tctggctcctcctttctctgca

SEQ ID NO: 13922 - RNA, 22 nt, synthetic construct
  source 1..22: mol_type = other RNA
ctctggctcctcctttctctgc

SEQ ID NO: 13923 - RNA, 22 nt, synthetic construct
  source 1..22: mol_type = other RNA
tctctggctcctcctttctctg

SEQ ID NO: 13924 - RNA, 22 nt, synthetic construct
  source 1..22: mol_type = other RNA
agctttttctctggctcctcct

SEQ ID NO: 13925 - RNA, 22 nt, synthetic construct
  source 1..22: mol_type = other RNA
tgtctctgtgtgtcacacagac

SEQ ID NO: 13926 - RNA, 22 nt, synthetic construct
  source 1..22: mol_type = other RNA
ctgtctctgtgtgtcacacaga

SEQ ID NO: 13927 - RNA, 22 nt, synthetic construct
  source 1..22: mol_type = other RNA
ggtttctgtctctgtgtgtcac

SEQ ID NO: 13928 - RNA, 22 nt, synthetic construct
  source 1..22: mol_type = other RNA
tcgctctccctctgtctttcgg

SEQ ID NO: 13929 - RNA, 22 nt, synthetic construct
  source 1..22: mol_type = other RNA
tctcccttcctttctcgctctc

SEQ ID NO: 13930 - RNA, 22 nt, synthetic construct
  source 1..22: mol_type = other RNA
tgtgtctgtctttctctccctt

SEQ ID NO: 13931 - RNA, 22 nt, synthetic construct
  source 1..22: mol_type = other RNA
tccctgtctctgcctgtctctc

SEQ ID NO: 13932 - RNA, 22 nt, synthetic construct
  source 1..22: mol_type = other RNA
ctccctgtctctgcctgtctct

SEQ ID NO: 13933 - RNA, 22 nt, synthetic construct
  source 1..22: mol_type = other RNA
tcttcctccatcagcctccacc

SEQ ID NO: 13934 - RNA, 22 nt, synthetic construct
  source 1..22: mol_type = other RNA
ctcttcctccatcagcctccac

SEQ ID NO: 13935 - RNA, 22 nt, synthetic construct
  source 1..22: mol_type = other RNA
tctcttcctccatcagcctcca

SEQ ID NO: 13936 - RNA, 22 nt, synthetic construct
  source 1..22: mol_type = other RNA
ccccaccttctccctttttctc

SEQ ID NO: 13937 - RNA, 22 nt, synthetic construct
  source 1..22: mol_type = other RNA
tttcccccaccttctccctttt

SEQ ID NO: 13938 - RNA, 22 nt, synthetic construct
  source 1..22: mol_type = other RNA
tctctctttctttcccccacct

SEQ ID NO: 13939 - RNA, 22 nt, synthetic construct
  source 1..22: mol_type = other RNA
tctctttctctctctttctttc

SEQ ID NO: 13940 - RNA, 22 nt, synthetic construct
  source 1..22: mol_type = other RNA
ttattctctctttctctctctt

SEQ ID NO: 13941 - RNA, 22 nt, synthetic construct
  source 1..22: mol_type = other RNA
tctctcccgtaagcgagttctt

SEQ ID NO: 13942 - RNA, 22 nt, synthetic construct
  source 1..22: mol_type = other RNA
tgtgccaccaacgctcttaaaa

SEQ ID NO: 13943 - RNA, 22 nt, synthetic construct
  source 1..22: mol_type = other RNA
agatgattgtgtgccaccaacg

SEQ ID NO: 13944 - RNA, 22 nt, synthetic construct
  source 1..22: mol_type = other RNA
gagatgattgtgtgccaccaac

SEQ ID NO: 13945 - RNA, 22 nt, synthetic construct
  source 1..22: mol_type = other RNA
tggtttgagatgattgtgtgcc

SEQ ID NO: 13946 - RNA, 22 nt, synthetic construct
  source 1..22: mol_type = other RNA
gaggagccaaggatgtgagtgg

SEQ ID NO: 13947 - RNA, 22 nt, synthetic construct
  source 1..22: mol_type = other RNA
taagtgggtaggagacgtaaaa

SEQ ID NO: 13948 - RNA, 22 nt, synthetic construct
  source 1..22: mol_type = other RNA
caatgaagggaggacttctttg

SEQ ID NO: 13949 - RNA, 22 nt, synthetic construct
  source 1..22: mol_type = other RNA
tgacattacaatgaagggagga

SEQ ID NO: 13950 - RNA, 22 nt, synthetic construct
  source 1..22: mol_type = other RNA
ggaggctgaggtgggaggatca

SEQ ID NO: 13951 - RNA, 22 nt, synthetic construct
  source 1..22: mol_type = other RNA
gccaggcatagtggtgcatgcc

SEQ ID NO: 13952 - RNA, 22 nt, synthetic construct
  source 1..22: mol_type = other RNA
aaaaaaaattagccaggcatag

SEQ ID NO: 13953 - RNA, 22 nt, synthetic construct
  source 1..22: mol_type = other RNA
gcaagcagcctggtcaacatag

SEQ ID NO: 13954 - RNA, 22 nt, synthetic construct
  source 1..22: mol_type = other RNA
ggaggccaaggtgggaggatcg

SEQ ID NO: 13955 - RNA, 22 nt, synthetic construct
  source 1..22: mol_type = other RNA
gggaggccaaggtgggaggatc

SEQ ID NO: 13956 - RNA, 22 nt, synthetic construct
  source 1..22: mol_type = other RNA
ggtgtggtggctcatgcctgta

SEQ ID NO: 13957 - RNA, 22 nt, synthetic construct
  source 1..22: mol_type = other RNA
tgaccaggttgggtgtggtggc

SEQ ID NO: 13958 - RNA, 22 nt, synthetic construct
  source 1..22: mol_type = other RNA
gaaagttatgaccaggttgggt

SEQ ID NO: 13959 - RNA, 22 nt, synthetic construct
  source 1..22: mol_type = other RNA
agaaggagatggaacaaacacc

SEQ ID NO: 13960 - RNA, 22 nt, synthetic construct
  source 1..22: mol_type = other RNA
cagaaggagatggaacaaacac

SEQ ID NO: 13961 - RNA, 22 nt, synthetic construct
  source 1..22: mol_type = other RNA
tctcaagacttgcatttcagaa

SEQ ID NO: 13962 - RNA, 22 nt, synthetic construct
  source 1..22: mol_type = other RNA
ttctctcaagacttgcatttca

SEQ ID NO: 13963 - RNA, 22 nt, synthetic construct
  source 1..22: mol_type = other RNA
tggcacactaaataatcaatgt

SEQ ID NO: 13964 - RNA, 22 nt, synthetic construct
  source 1..22: mol_type = other RNA
ctggcacactaaataatcaatg

SEQ ID NO: 13965 - RNA, 22 nt, synthetic construct
  source 1..22: mol_type = other RNA
cgcttaggctgtttctggcaca

SEQ ID NO: 13966 - RNA, 22 nt, synthetic construct
  source 1..22: mol_type = other RNA
tagattgcgcttaggctgtttc

SEQ ID NO: 13967 - RNA, 22 nt, synthetic construct
  source 1..22: mol_type = other RNA
aataaggatggggatcaaaggg

SEQ ID NO: 13968 - RNA, 22 nt, synthetic construct
  source 1..22: mol_type = other RNA
agtgttaaataaggatggggat

SEQ ID NO: 13969 - RNA, 22 nt, synthetic construct
  source 1..22: mol_type = other RNA
ttctttaagtgttaaataagga

SEQ ID NO: 13970 - RNA, 22 nt, synthetic construct
  source 1..22: mol_type = other RNA
cttctttaagtgttaaataagg

SEQ ID NO: 13971 - RNA, 22 nt, synthetic construct
  source 1..22: mol_type = other RNA
tcttctttaagtgttaaataag

SEQ ID NO: 13972 - RNA, 22 nt, synthetic construct
  source 1..22: mol_type = other RNA
cgtcacccctgggcagagtctg

SEQ ID NO: 13973 - RNA, 22 nt, synthetic construct
  source 1..22: mol_type = other RNA
aagatcaaagcttgtctgtctt

SEQ ID NO: 13974 - RNA, 22 nt, synthetic construct
  source 1..22: mol_type = other RNA
atgccctgaaggctaagttgaa

SEQ ID NO: 13975 - RNA, 22 nt, synthetic construct
  source 1..22: mol_type = other RNA
gatgccctgaaggctaagttga

SEQ ID NO: 13976 - RNA, 22 nt, synthetic construct
  source 1..22: mol_type = other RNA
tcttggcaggaaagctggtaaa

SEQ ID NO: 13977 - RNA, 22 nt, synthetic construct
  source 1..22: mol_type = other RNA
accacaagaagaaccagccctg

SEQ ID NO: 13978 - RNA, 22 nt, synthetic construct
  source 1..22: mol_type = other RNA
gaccacaagaagaaccagccct

SEQ ID NO: 13979 - RNA, 22 nt, synthetic construct
  source 1..22: mol_type = other RNA
aagaggagtccaatagacgatg

SEQ ID NO: 13980 - RNA, 22 nt, synthetic construct
  source 1..22: mol_type = other RNA
ggaggaagagaattaaagagga

SEQ ID NO: 13981 - RNA, 22 nt, synthetic construct
  source 1..22: mol_type = other RNA
cctaggtgactgttaggaggaa

SEQ ID NO: 13982 - RNA, 22 nt, synthetic construct
  source 1..22: mol_type = other RNA
ggtggtaaagatgcccctttgc

SEQ ID NO: 13983 - RNA, 22 nt, synthetic construct
  source 1..22: mol_type = other RNA
gggtggtaaagatgcccctttg

SEQ ID NO: 13984 - RNA, 22 nt, synthetic construct
  source 1..22: mol_type = other RNA
agaagccaagggagaatgtttg

SEQ ID NO: 13985 - RNA, 22 nt, synthetic construct
  source 1..22: mol_type = other RNA
tggcttctcccccaggtggcat

SEQ ID NO: 13986 - RNA, 22 nt, synthetic construct
  source 1..22: mol_type = other RNA
aataacaggaaccagcactctc

SEQ ID NO: 13987 - RNA, 22 nt, synthetic construct
  source 1..22: mol_type = other RNA
cctcccgagggaggaaacagag

SEQ ID NO: 13988 - RNA, 22 nt, synthetic construct
  source 1..22: mol_type = other RNA
tggagtcacgtgggatcagaaa

SEQ ID NO: 13989 - RNA, 22 nt, synthetic construct
  source 1..22: mol_type = other RNA
cactttctggagtcacgtggga

SEQ ID NO: 13990 - RNA, 22 nt, synthetic construct
  source 1..22: mol_type = other RNA
ttcccctctgagagctgcccag

SEQ ID NO: 13991 - RNA, 22 nt, synthetic construct
  source 1..22: mol_type = other RNA
tcttgccctgtcctctttcttc

SEQ ID NO: 13992 - RNA, 22 nt, synthetic construct
  source 1..22: mol_type = other RNA
caaaccatgcaattctcttgcc

SEQ ID NO: 13993 - RNA, 22 nt, synthetic construct
  source 1..22: mol_type = other RNA
acaaaccatgcaattctcttgc

SEQ ID NO: 13994 - RNA, 22 nt, synthetic construct
  source 1..22: mol_type = other RNA
tttacaaaccatgcaattctct

SEQ ID NO: 13995 - RNA, 22 nt, synthetic construct
  source 1..22: mol_type = other RNA
cgaacccccatcaaaatgaaag

SEQ ID NO: 13996 - RNA, 22 nt, synthetic construct
  source 1..22: mol_type = other RNA
ccgaacccccatcaaaatgaaa

SEQ ID NO: 13997 - RNA, 22 nt, synthetic construct
  source 1..22: mol_type = other RNA
cttttccgaacccccatcaaaa

SEQ ID NO: 13998 - RNA, 22 nt, synthetic construct
  source 1..22: mol_type = other RNA
ccttttccgaacccccatcaaa

SEQ ID NO: 13999 - RNA, 22 nt, synthetic construct
  source 1..22: mol_type = other RNA
agagggagggtcacaaaaaccc

SEQ ID NO: 14000 - RNA, 22 nt, synthetic construct
  source 1..22: mol_type = other RNA
tagagtggttgagagggagggt

SEQ ID NO: 14001 - RNA, 22 nt, synthetic construct
  source 1..22: mol_type = other RNA
gcacagcagagggccaaggtca

SEQ ID NO: 14002 - RNA, 22 nt, synthetic construct
  source 1..22: mol_type = other RNA
agcacagcagagggccaaggtc

SEQ ID NO: 14003 - RNA, 22 nt, synthetic construct
  source 1..22: mol_type = other RNA
tctgagtaacgtgggagccagt

SEQ ID NO: 14004 - RNA, 22 nt, synthetic construct
  source 1..22: mol_type = other RNA
ctctgagtaacgtgggagccag

SEQ ID NO: 14005 - RNA, 22 nt, synthetic construct
  source 1..22: mol_type = other RNA
tctctgagtaacgtgggagcca

SEQ ID NO: 14006 - RNA, 22 nt, synthetic construct
  source 1..22: mol_type = other RNA
gctttttctctgagtaacgtgg

SEQ ID NO: 14007 - RNA, 22 nt, synthetic construct
  source 1..22: mol_type = other RNA
agctttttctctgagtaacgtg

SEQ ID NO: 14008 - RNA, 22 nt, synthetic construct
  source 1..22: mol_type = other RNA
tccagatttagctttttctctg

SEQ ID NO: 14009 - RNA, 22 nt, synthetic construct
  source 1..22: mol_type = other RNA
tgaggcagacagtgtgctgagc

SEQ ID NO: 14010 - RNA, 22 nt, synthetic construct
  source 1..22: mol_type = other RNA
accaagaaaatgcttagagaac

SEQ ID NO: 14011 - RNA, 22 nt, synthetic construct
  source 1..22: mol_type = other RNA
ggaggttgaccaagaaaatgct

SEQ ID NO: 14012 - RNA, 22 nt, synthetic construct
  source 1..22: mol_type = other RNA
aggaggttgaccaagaaaatgc

SEQ ID NO: 14013 - RNA, 22 nt, synthetic construct
  source 1..22: mol_type = other RNA
ataaggtgcaaagaatagaagg

SEQ ID NO: 14014 - RNA, 22 nt, synthetic construct
  source 1..22: mol_type = other RNA
taaatggcttggtcagggcagg

SEQ ID NO: 14015 - RNA, 22 nt, synthetic construct
  source 1..22: mol_type = other RNA
caattctaaatggcttggtcag

SEQ ID NO: 14016 - RNA, 22 nt, synthetic construct
  source 1..22: mol_type = other RNA
cagtgagctgagatctcaccac

SEQ ID NO: 14017 - RNA, 22 nt, synthetic construct
  source 1..22: mol_type = other RNA
ggaggctgaggcatgagaactg

SEQ ID NO: 14018 - RNA, 22 nt, synthetic construct
  source 1..22: mol_type = other RNA
gggaggctgaggcatgagaact

SEQ ID NO: 14019 - RNA, 22 nt, synthetic construct
  source 1..22: mol_type = other RNA
gccaggcatagtggcacaaacc

SEQ ID NO: 14020 - RNA, 22 nt, synthetic construct
  source 1..22: mol_type = other RNA
aagaccagcctggccaacttgg

SEQ ID NO: 14021 - RNA, 22 nt, synthetic construct
  source 1..22: mol_type = other RNA
tggggtgggcggatcacttgat

SEQ ID NO: 14022 - RNA, 22 nt, synthetic construct
  source 1..22: mol_type = other RNA
tcccagtactttgtggggtggg

SEQ ID NO: 14023 - RNA, 22 nt, synthetic construct
  source 1..22: mol_type = other RNA
cagtgggagggtcaaacaataa

SEQ ID NO: 14024 - RNA, 22 nt, synthetic construct
  source 1..22: mol_type = other RNA
ccagtgggagggtcaaacaata

SEQ ID NO: 14025 - RNA, 22 nt, synthetic construct
  source 1..22: mol_type = other RNA
tccagtgggagggtcaaacaat

SEQ ID NO: 14026 - RNA, 22 nt, synthetic construct
  source 1..22: mol_type = other RNA
ttttccagtgggagggtcaaac

SEQ ID NO: 14027 - RNA, 22 nt, synthetic construct
  source 1..22: mol_type = other RNA
attttccagtgggagggtcaaa

SEQ ID NO: 14028 - RNA, 22 nt, synthetic construct
  source 1..22: mol_type = other RNA
tgatcaaaacatagatccatgt

SEQ ID NO: 14029 - RNA, 22 nt, synthetic construct
  source 1..22: mol_type = other RNA
ggacatattgtgatcaaaacat

SEQ ID NO: 14030 - RNA, 22 nt, synthetic construct
  source 1..22: mol_type = other RNA
gggacatattgtgatcaaaaca

SEQ ID NO: 14031 - RNA, 22 nt, synthetic construct
  source 1..22: mol_type = other RNA
catacctaccctgtgctcaggc

SEQ ID NO: 14032 - RNA, 22 nt, synthetic construct
  source 1..22: mol_type = other RNA
aacaaatatatattgcatacct

SEQ ID NO: 14033 - RNA, 22 nt, synthetic construct
  source 1..22: mol_type = other RNA
atccatctacccactcatcaac

SEQ ID NO: 14034 - RNA, 22 nt, synthetic construct
  source 1..22: mol_type = other RNA
catgaactatccattcatccat

SEQ ID NO: 14035 - RNA, 22 nt, synthetic construct
  source 1..22: mol_type = other RNA
gtaaagtaggaataatggcatt

SEQ ID NO: 14036 - RNA, 22 nt, synthetic construct
  source 1..22: mol_type = other RNA
ctcattggtaaagtaggaataa

SEQ ID NO: 14037 - RNA, 22 nt, synthetic construct
  source 1..22: mol_type = other RNA
actcattggtaaagtaggaata

SEQ ID NO: 14038 - RNA, 22 nt, synthetic construct
  source 1..22: mol_type = other RNA
acttctctgtgcctcagtttac

SEQ ID NO: 14039 - RNA, 22 nt, synthetic construct
  source 1..22: mol_type = other RNA
gccaggactcatgagaccccat

SEQ ID NO: 14040 - RNA, 22 nt, synthetic construct
  source 1..22: mol_type = other RNA
caggaagtactgcaattggcca

SEQ ID NO: 14041 - RNA, 22 nt, synthetic construct
  source 1..22: mol_type = other RNA
gcaggaagtactgcaattggcc

SEQ ID NO: 14042 - RNA, 22 nt, synthetic construct
  source 1..22: mol_type = other RNA
tgcaggaagtactgcaattggc

SEQ ID NO: 14043 - RNA, 22 nt, synthetic construct
  source 1..22: mol_type = other RNA
ttgcaggaagtactgcaattgg

SEQ ID NO: 14044 - RNA, 22 nt, synthetic construct
  source 1..22: mol_type = other RNA
tttgcaggaagtactgcaattg

SEQ ID NO: 14045 - RNA, 22 nt, synthetic construct
  source 1..22: mol_type = other RNA
ttttgcaggaagtactgcaatt

SEQ ID NO: 14046 - RNA, 22 nt, synthetic construct
  source 1..22: mol_type = other RNA
tttttgcaggaagtactgcaat

SEQ ID NO: 14047 - RNA, 22 nt, synthetic construct
  source 1..22: mol_type = other RNA
ttttttgcaggaagtactgcaa

SEQ ID NO: 14048 - RNA, 22 nt, synthetic construct
  source 1..22: mol_type = other RNA
tttttttgcaggaagtactgca

SEQ ID NO: 14049 - RNA, 22 nt, synthetic construct
  source 1..22: mol_type = other RNA
ttttttttgcaggaagtactgc

SEQ ID NO: 14050 - RNA, 22 nt, synthetic construct
  source 1..22: mol_type = other RNA
tttttttttgcaggaagtactg

SEQ ID NO: 14051 - RNA, 22 nt, synthetic construct
  source 1..22: mol_type = other RNA
ttttttttttgcaggaagtact

SEQ ID NO: 14052 - RNA, 22 nt, synthetic construct
  source 1..22: mol_type = other RNA
tttttttttttgcaggaagtac

SEQ ID NO: 14053 - RNA, 22 nt, synthetic construct
  source 1..22: mol_type = other RNA
ttttttttttttgcaggaagta

SEQ ID NO: 14054 - RNA, 22 nt, synthetic construct
  source 1..22: mol_type = other RNA
tttttttttttttgcaggaagt

SEQ ID NO: 14055 - RNA, 22 nt, synthetic construct
  source 1..22: mol_type = other RNA
ttttttttttttttgcaggaag

SEQ ID NO: 14056 - RNA, 22 nt, synthetic construct
  source 1..22: mol_type = other RNA
tttttttttttttttgcaggaa

SEQ ID NO: 14057 - RNA, 22 nt, synthetic construct
  source 1..22: mol_type = other RNA
ttttttttttttttttgcagga

SEQ ID NO: 14058 - RNA, 22 nt, synthetic construct
  source 1..22: mol_type = other RNA
tttttttttttttttttgcagg

SEQ ID NO: 14059 - RNA, 22 nt, synthetic construct
  source 1..22: mol_type = other RNA
gaagaggaagctaaagcagtac

SEQ ID NO: 14060 - RNA, 22 nt, synthetic construct
  source 1..22: mol_type = other RNA
agaagaggaagctaaagcagta

SEQ ID NO: 14061 - RNA, 22 nt, synthetic construct
  source 1..22: mol_type = other RNA
tttagaagaggaagctaaagca

SEQ ID NO: 14062 - RNA, 22 nt, synthetic construct
  source 1..22: mol_type = other RNA
cggtagccccttgggttgttta

SEQ ID NO: 14063 - RNA, 22 nt, synthetic construct
  source 1..22: mol_type = other RNA
acggtagccccttgggttgttt

SEQ ID NO: 14064 - RNA, 22 nt, synthetic construct
  source 1..22: mol_type = other RNA
gggtagatttacggtagcccct

SEQ ID NO: 14065 - RNA, 22 nt, synthetic construct
  source 1..22: mol_type = other RNA
ggggtagatttacggtagcccc

SEQ ID NO: 14066 - RNA, 22 nt, synthetic construct
  source 1..22: mol_type = other RNA
aagactgccaccctatttgggg

SEQ ID NO: 14067 - RNA, 22 nt, synthetic construct
  source 1..22: mol_type = other RNA
gaagactgccaccctatttggg

SEQ ID NO: 14068 - RNA, 22 nt, synthetic construct
  source 1..22: mol_type = other RNA
agtttgaagactgccaccctat

SEQ ID NO: 14069 - RNA, 22 nt, synthetic construct
  source 1..22: mol_type = other RNA
cagtttgaagactgccacccta

SEQ ID NO: 14070 - RNA, 22 nt, synthetic construct
  source 1..22: mol_type = other RNA
cacctaaggcactgcaatatct

SEQ ID NO: 14071 - RNA, 22 nt, synthetic construct
  source 1..22: mol_type = other RNA
tgcacaattgcacctaaggcac

SEQ ID NO: 14072 - RNA, 22 nt, synthetic construct
  source 1..22: mol_type = other RNA
ctcagtgtagcacagagcgaaa

SEQ ID NO: 14073 - RNA, 22 nt, synthetic construct
  source 1..22: mol_type = other RNA
ctggggctggatgcacacaggt

SEQ ID NO: 14074 - RNA, 22 nt, synthetic construct
  source 1..22: mol_type = other RNA
actcttgggactcactggaact

SEQ ID NO: 14075 - RNA, 22 nt, synthetic construct
  source 1..22: mol_type = other RNA
ctccagggcaaggactttgact

SEQ ID NO: 14076 - RNA, 22 nt, synthetic construct
  source 1..22: mol_type = other RNA
acttcccactgaggcacctgag

SEQ ID NO: 14077 - RNA, 22 nt, synthetic construct
  source 1..22: mol_type = other RNA
ctttaacttcccactgaggcac

SEQ ID NO: 14078 - RNA, 22 nt, synthetic construct
  source 1..22: mol_type = other RNA
gctttaacttcccactgaggca

SEQ ID NO: 14079 - RNA, 22 nt, synthetic construct
  source 1..22: mol_type = other RNA
accagggactgcctaaatgttt

SEQ ID NO: 14080 - RNA, 22 nt, synthetic construct
  source 1..22: mol_type = other RNA
tgacccactgttgaccagggac

SEQ ID NO: 14081 - RNA, 22 nt, synthetic construct
  source 1..22: mol_type = other RNA
agatgttgtgacccactgttga

SEQ ID NO: 14082 - RNA, 22 nt, synthetic construct
  source 1..22: mol_type = other RNA
ttcagatgttgtgacccactgt

SEQ ID NO: 14083 - RNA, 22 nt, synthetic construct
  source 1..22: mol_type = other RNA
gcctctgatagatgttgttcag

SEQ ID NO: 14084 - RNA, 22 nt, synthetic construct
  source 1..22: mol_type = other RNA
catcatcacccatcctagctcc

SEQ ID NO: 14085 - RNA, 22 nt, synthetic construct
  source 1..22: mol_type = other RNA
ccatcatcacccatcctagctc

SEQ ID NO: 14086 - RNA, 22 nt, synthetic construct
  source 1..22: mol_type = other RNA
tccatcatcacccatcctagct

SEQ ID NO: 14087 - RNA, 22 nt, synthetic construct
  source 1..22: mol_type = other RNA
tttttccatcatcacccatcct

SEQ ID NO: 14088 - RNA, 22 nt, synthetic construct
  source 1..22: mol_type = other RNA
cgagtggtctagtcatgtggcc

SEQ ID NO: 14089 - RNA, 22 nt, synthetic construct
  source 1..22: mol_type = other RNA
agagatgaagaaactgagattc

SEQ ID NO: 14090 - RNA, 22 nt, synthetic construct
  source 1..22: mol_type = other RNA
cagagatgaagaaactgagatt

SEQ ID NO: 14091 - RNA, 22 nt, synthetic construct
  source 1..22: mol_type = other RNA
ctcccatttcagagatgaagaa

SEQ ID NO: 14092 - RNA, 22 nt, synthetic construct
  source 1..22: mol_type = other RNA
gtatcattgctcccatttcaga

SEQ ID NO: 14093 - RNA, 22 nt, synthetic construct
  source 1..22: mol_type = other RNA
accctcactagagccctgggag

SEQ ID NO: 14094 - RNA, 22 nt, synthetic construct
  source 1..22: mol_type = other RNA
aaccctcactagagccctggga

SEQ ID NO: 14095 - RNA, 22 nt, synthetic construct
  source 1..22: mol_type = other RNA
tacctaccatctcatttaaccc

SEQ ID NO: 14096 - RNA, 22 nt, synthetic construct
  source 1..22: mol_type = other RNA
ctacctaccatctcatttaacc

SEQ ID NO: 14097 - RNA, 22 nt, synthetic construct
  source 1..22: mol_type = other RNA
tacagtgcgacctaatgccaag

SEQ ID NO: 14098 - RNA, 22 nt, synthetic construct
  source 1..22: mol_type = other RNA
atacagtgcgacctaatgccaa

SEQ ID NO: 14099 - RNA, 22 nt, synthetic construct
  source 1..22: mol_type = other RNA
gactcagagtggtctgatattt

SEQ ID NO: 14100 - RNA, 22 nt, synthetic construct
  source 1..22: mol_type = other RNA
tccttgctgttagactcagagt

SEQ ID NO: 14101 - RNA, 22 nt, synthetic construct
  source 1..22: mol_type = other RNA
cattctccttgctgttagactc

SEQ ID NO: 14102 - RNA, 22 nt, synthetic construct
  source 1..22: mol_type = other RNA
tcttcttcctgttccattctcc

SEQ ID NO: 14103 - RNA, 22 nt, synthetic construct
  source 1..22: mol_type = other RNA
atcttcttcctgttccattctc

SEQ ID NO: 14104 - RNA, 22 nt, synthetic construct
  source 1..22: mol_type = other RNA
ttggtgcctcaaacccctggtt

SEQ ID NO: 14105 - RNA, 22 nt, synthetic construct
  source 1..22: mol_type = other RNA
cttggtgcctcaaacccctggt

SEQ ID NO: 14106 - RNA, 22 nt, synthetic construct
  source 1..22: mol_type = other RNA
tcttggtgcctcaaacccctgg

SEQ ID NO: 14107 - RNA, 22 nt, synthetic construct
  source 1..22: mol_type = other RNA
ttcttggtgcctcaaacccctg

SEQ ID NO: 14108 - RNA, 22 nt, synthetic construct
  source 1..22: mol_type = other RNA
tttttcttggtgcctcaaaccc

SEQ ID NO: 14109 - RNA, 22 nt, synthetic construct
  source 1..22: mol_type = other RNA
tctggggcccccagactgcagt

SEQ ID NO: 14110 - RNA, 22 nt, synthetic construct
  source 1..22: mol_type = other RNA
catggggtaggtgtctagatat

SEQ ID NO: 14111 - RNA, 22 nt, synthetic construct
  source 1..22: mol_type = other RNA
gcatggggtaggtgtctagata

SEQ ID NO: 14112 - RNA, 22 nt, synthetic construct
  source 1..22: mol_type = other RNA
tgcatggggtaggtgtctagat

SEQ ID NO: 14113 - RNA, 22 nt, synthetic construct
  source 1..22: mol_type = other RNA
tcaaatatgcacagtacccaag

SEQ ID NO: 14114 - RNA, 22 nt, synthetic construct
  source 1..22: mol_type = other RNA
ctcaaatatgcacagtacccaa

SEQ ID NO: 14115 - RNA, 22 nt, synthetic construct
  source 1..22: mol_type = other RNA
tttctcaaatatgcacagtacc

SEQ ID NO: 14116 - RNA, 22 nt, synthetic construct
  source 1..22: mol_type = other RNA
gtttctcaaatatgcacagtac

SEQ ID NO: 14117 - RNA, 22 nt, synthetic construct
  source 1..22: mol_type = other RNA
atttgtttctcaaatatgcaca

SEQ ID NO: 14118 - RNA, 22 nt, synthetic construct
  source 1..22: mol_type = other RNA
ggaaggcaggacaggcactcag

SEQ ID NO: 14119 - RNA, 22 nt, synthetic construct
  source 1..22: mol_type = other RNA
tagatggggaaactgaggcggg

SEQ ID NO: 14120 - RNA, 22 nt, synthetic construct
  source 1..22: mol_type = other RNA
tcatctccactttatagatggg

SEQ ID NO: 14121 - RNA, 22 nt, synthetic construct
  source 1..22: mol_type = other RNA
cctcagacgccagcctcaaggc

SEQ ID NO: 14122 - RNA, 22 nt, synthetic construct
  source 1..22: mol_type = other RNA
ggcttgtggttgcctcagacgc

SEQ ID NO: 14123 - RNA, 22 nt, synthetic construct
  source 1..22: mol_type = other RNA
caccatgcacgttgggcttgtg

SEQ ID NO: 14124 - RNA, 22 nt, synthetic construct
  source 1..22: mol_type = other RNA
cccccacttacagtcatctttc

SEQ ID NO: 14125 - RNA, 22 nt, synthetic construct
  source 1..22: mol_type = other RNA
catggtcaaacccaaggccagc

SEQ ID NO: 14126 - RNA, 22 nt, synthetic construct
  source 1..22: mol_type = other RNA
tgcctcgcattccatggtcaaa

SEQ ID NO: 14127 - RNA, 22 nt, synthetic construct
  source 1..22: mol_type = other RNA
ctagaactgagacctcatgggc

SEQ ID NO: 14128 - RNA, 22 nt, synthetic construct
  source 1..22: mol_type = other RNA
tgtcattcctagaactgagacc

SEQ ID NO: 14129 - RNA, 22 nt, synthetic construct
  source 1..22: mol_type = other RNA
ttctgtcattcctagaactgag

SEQ ID NO: 14130 - RNA, 22 nt, synthetic construct
  source 1..22: mol_type = other RNA
caataaatcaggcgacttccca

SEQ ID NO: 14131 - RNA, 22 nt, synthetic construct
  source 1..22: mol_type = other RNA
ctccctttccaataaatcaggc

SEQ ID NO: 14132 - RNA, 22 nt, synthetic construct
  source 1..22: mol_type = other RNA
tcacatcctaagggccagatgg

SEQ ID NO: 14133 - RNA, 22 nt, synthetic construct
  source 1..22: mol_type = other RNA
ctcacatcctaagggccagatg

SEQ ID NO: 14134 - RNA, 22 nt, synthetic construct
  source 1..22: mol_type = other RNA
tcaggaaaggaagcccagaagg

SEQ ID NO: 14135 - RNA, 22 nt, synthetic construct
  source 1..22: mol_type = other RNA
ctggggtagagggccagagaag

SEQ ID NO: 14136 - RNA, 22 nt, synthetic construct
  source 1..22: mol_type = other RNA
gaacaggctggcctgggaaaac

SEQ ID NO: 14137 - RNA, 22 nt, synthetic construct
  source 1..22: mol_type = other RNA
ggaacaggctggcctgggaaaa

SEQ ID NO: 14138 - RNA, 22 nt, synthetic construct
  source 1..22: mol_type = other RNA
gagaagtgccaggcttgggggc

SEQ ID NO: 14139 - RNA, 22 nt, synthetic construct
  source 1..22: mol_type = other RNA
gagggcaggcaggtaggtggat

SEQ ID NO: 14140 - RNA, 22 nt, synthetic construct
  source 1..22: mol_type = other RNA
aaaaaaagacagggtgagaata

SEQ ID NO: 14141 - RNA, 22 nt, synthetic construct
  source 1..22: mol_type = other RNA
cagcctgggctacaaagcaaga

SEQ ID NO: 14142 - RNA, 22 nt, synthetic construct
  source 1..22: mol_type = other RNA
taatgagctgagatcacgccac

SEQ ID NO: 14143 - RNA, 22 nt, synthetic construct
  source 1..22: mol_type = other RNA
cttgaatctgggaggcagaggt

SEQ ID NO: 14144 - RNA, 22 nt, synthetic construct
  source 1..22: mol_type = other RNA
gctcggcatggtggcaggcgcc

SEQ ID NO: 14145 - RNA, 22 nt, synthetic construct
  source 1..22: mol_type = other RNA
agaccagcctggccaacatgat

SEQ ID NO: 14146 - RNA, 22 nt, synthetic construct
  source 1..22: mol_type = other RNA
gagaccagcctggccaacatga

SEQ ID NO: 14147 - RNA, 22 nt, synthetic construct
  source 1..22: mol_type = other RNA
cttgaggtcaggagtttgagac

SEQ ID NO: 14148 - RNA, 22 nt, synthetic construct
  source 1..22: mol_type = other RNA
ggaagctgagatgggtggattg

SEQ ID NO: 14149 - RNA, 22 nt, synthetic construct
  source 1..22: mol_type = other RNA
gggaagctgagatgggtggatt

SEQ ID NO: 14150 - RNA, 22 nt, synthetic construct
  source 1..22: mol_type = other RNA
tgggaagctgagatgggtggat

SEQ ID NO: 14151 - RNA, 22 nt, synthetic construct
  source 1..22: mol_type = other RNA
ccaccataagacagggcgagag

SEQ ID NO: 14152 - RNA, 22 nt, synthetic construct
  source 1..22: mol_type = other RNA
agaagtagattaccaccataag

SEQ ID NO: 14153 - RNA, 22 nt, synthetic construct
  source 1..22: mol_type = other RNA
actgataagtagacatgagtaa

SEQ ID NO: 14154 - RNA, 22 nt, synthetic construct
  source 1..22: mol_type = other RNA
ggtaggtagagaaatggattaa

SEQ ID NO: 14155 - RNA, 22 nt, synthetic construct
  source 1..22: mol_type = other RNA
acatgtaaatacatgggaaata

SEQ ID NO: 14156 - RNA, 22 nt, synthetic construct
  source 1..22: mol_type = other RNA
taaagggggcttagctggtagg

SEQ ID NO: 14157 - RNA, 22 nt, synthetic construct
  source 1..22: mol_type = other RNA
ttgtaaagggggcttagctggt

SEQ ID NO: 14158 - RNA, 22 nt, synthetic construct
  source 1..22: mol_type = other RNA
gggagggacatgggagggtgta

SEQ ID NO: 14159 - RNA, 22 nt, synthetic construct
  source 1..22: mol_type = other RNA
aggagaaggaaagaaaggaggc

SEQ ID NO: 14160 - RNA, 22 nt, synthetic construct
  source 1..22: mol_type = other RNA
tagcaggtgctaaataaatgat

SEQ ID NO: 14161 - RNA, 22 nt, synthetic construct
  source 1..22: mol_type = other RNA
ctagcaggtgctaaataaatga

SEQ ID NO: 14162 - RNA, 22 nt, synthetic construct
  source 1..22: mol_type = other RNA
gtgaaagagcactggatgggga

SEQ ID NO: 14163 - RNA, 22 nt, synthetic construct
  source 1..22: mol_type = other RNA
ggtgaaagagcactggatgggg

SEQ ID NO: 14164 - RNA, 22 nt, synthetic construct
  source 1..22: mol_type = other RNA
tggtgaaagagcactggatggg

SEQ ID NO: 14165 - RNA, 22 nt, synthetic construct
  source 1..22: mol_type = other RNA
aaagtccttcttcatctcatgc

SEQ ID NO: 14166 - RNA, 22 nt, synthetic construct
  source 1..22: mol_type = other RNA
ctcccctactaggttaaaagtc

SEQ ID NO: 14167 - RNA, 22 nt, synthetic construct
  source 1..22: mol_type = other RNA
caaatggatgaagattcctccc

SEQ ID NO: 14168 - RNA, 22 nt, synthetic construct
  source 1..22: mol_type = other RNA
aatgatcaaggcagcctccagt

SEQ ID NO: 14169 - RNA, 22 nt, synthetic construct
  source 1..22: mol_type = other RNA
gaatgatcaaggcagcctccag

SEQ ID NO: 14170 - RNA, 22 nt, synthetic construct
  source 1..22: mol_type = other RNA
gatttgaatgatcaaggcagcc

SEQ ID NO: 14171 - RNA, 22 nt, synthetic construct
  source 1..22: mol_type = other RNA
agatttgaatgatcaaggcagc

SEQ ID NO: 14172 - RNA, 22 nt, synthetic construct
  source 1..22: mol_type = other RNA
tagatttgaatgatcaaggcag

SEQ ID NO: 14173 - RNA, 22 nt, synthetic construct
  source 1..22: mol_type = other RNA
aaggaatgaatggagttttaga

SEQ ID NO: 14174 - RNA, 22 nt, synthetic construct
  source 1..22: mol_type = other RNA
gaaggaatgaatggagttttag

SEQ ID NO: 14175 - RNA, 22 nt, synthetic construct
  source 1..22: mol_type = other RNA
taagaccatttgaaggaatgaa

SEQ ID NO: 14176 - RNA, 22 nt, synthetic construct
  source 1..22: mol_type = other RNA
cgccactgtgctccagccttgg

SEQ ID NO: 14177 - RNA, 22 nt, synthetic construct
  source 1..22: mol_type = other RNA
aggctgtagtgagctgtgattg

SEQ ID NO: 14178 - RNA, 22 nt, synthetic construct
  source 1..22: mol_type = other RNA
gccgggcatagtggtgcatgcc

SEQ ID NO: 14179 - RNA, 22 nt, synthetic construct
  source 1..22: mol_type = other RNA
agaccagccgtgggaaacatag

SEQ ID NO: 14180 - RNA, 22 nt, synthetic construct
  source 1..22: mol_type = other RNA
gagaccagccgtgggaaacata

SEQ ID NO: 14181 - RNA, 22 nt, synthetic construct
  source 1..22: mol_type = other RNA
ggaggctaaggcaggtatgtcg

SEQ ID NO: 14182 - RNA, 22 nt, synthetic construct
  source 1..22: mol_type = other RNA
tcaggcgaggtgcagtggcaca

SEQ ID NO: 14183 - RNA, 22 nt, synthetic construct
  source 1..22: mol_type = other RNA
aaagacacattatcaggcgagg

SEQ ID NO: 14184 - RNA, 22 nt, synthetic construct
  source 1..22: mol_type = other RNA
gaaagacacattatcaggcgag

SEQ ID NO: 14185 - RNA, 22 nt, synthetic construct
  source 1..22: mol_type = other RNA
tgcacttaccccaatacctaca

SEQ ID NO: 14186 - RNA, 22 nt, synthetic construct
  source 1..22: mol_type = other RNA
ctgcacttaccccaatacctac

SEQ ID NO: 14187 - RNA, 22 nt, synthetic construct
  source 1..22: mol_type = other RNA
tctgcacttaccccaataccta

SEQ ID NO: 14188 - RNA, 22 nt, synthetic construct
  source 1..22: mol_type = other RNA
attttctgcacttaccccaata

SEQ ID NO: 14189 - RNA, 22 nt, synthetic construct
  source 1..22: mol_type = other RNA
atgtctaggatcaggtctttaa

SEQ ID NO: 14190 - RNA, 22 nt, synthetic construct
  source 1..22: mol_type = other RNA
gatcatacatctgttaatgtct

SEQ ID NO: 14191 - RNA, 22 nt, synthetic construct
  source 1..22: mol_type = other RNA
ataagcatcatctctgctacct

SEQ ID NO: 14192 - RNA, 22 nt, synthetic construct
  source 1..22: mol_type = other RNA
aagttcataagcatcatctctg

SEQ ID NO: 14193 - RNA, 22 nt, synthetic construct
  source 1..22: mol_type = other RNA
actttcaagttcataagcatca

SEQ ID NO: 14194 - RNA, 22 nt, synthetic construct
  source 1..22: mol_type = other RNA
gcaatacaactttaactttcaa

SEQ ID NO: 14195 - RNA, 22 nt, synthetic construct
  source 1..22: mol_type = other RNA
ggcaatacaactttaactttca

SEQ ID NO: 14196 - RNA, 22 nt, synthetic construct
  source 1..22: mol_type = other RNA
tttggcaatacaactttaactt

SEQ ID NO: 14197 - RNA, 22 nt, synthetic construct
  source 1..22: mol_type = other RNA
caaaacttgctgcaacattatt

SEQ ID NO: 14198 - RNA, 22 nt, synthetic construct
  source 1..22: mol_type = other RNA
acaaaacttgctgcaacattat

SEQ ID NO: 14199 - RNA, 22 nt, synthetic construct
  source 1..22: mol_type = other RNA
tacaaaacttgctgcaacatta

SEQ ID NO: 14200 - RNA, 22 nt, synthetic construct
  source 1..22: mol_type = other RNA
ctgtgttttacaaaacttgctg

SEQ ID NO: 14201 - RNA, 22 nt, synthetic construct
  source 1..22: mol_type = other RNA
ttgctttgctgtgttttacaaa

SEQ ID NO: 14202 - RNA, 22 nt, synthetic construct
  source 1..22: mol_type = other RNA
cttgctttgctgtgttttacaa

SEQ ID NO: 14203 - RNA, 22 nt, synthetic construct
  source 1..22: mol_type = other RNA
tcttgctttgctgtgttttaca

SEQ ID NO: 14204 - RNA, 22 nt, synthetic construct
  source 1..22: mol_type = other RNA
ccaccttcatcgcgcttccagc

SEQ ID NO: 14205 - RNA, 22 nt, synthetic construct
  source 1..22: mol_type = other RNA
gccatcctgcaaagctcgagtt

SEQ ID NO: 14206 - RNA, 22 nt, synthetic construct
  source 1..22: mol_type = other RNA
agccatcctgcaaagctcgagt

SEQ ID NO: 14207 - RNA, 22 nt, synthetic construct
  source 1..22: mol_type = other RNA
tagccatcctgcaaagctcgag

SEQ ID NO: 14208 - RNA, 22 nt, synthetic construct
  source 1..22: mol_type = other RNA
gtctatattttagccatcctgc

SEQ ID NO: 14209 - RNA, 22 nt, synthetic construct
  source 1..22: mol_type = other RNA
ggtctatattttagccatcctg

SEQ ID NO: 14210 - RNA, 22 nt, synthetic construct
  source 1..22: mol_type = other RNA
cctgcaagccaaggaagaatgc

SEQ ID NO: 14211 - RNA, 22 nt, synthetic construct
  source 1..22: mol_type = other RNA
caccttggttccctgcaagcca

SEQ ID NO: 14212 - RNA, 22 nt, synthetic construct
  source 1..22: mol_type = other RNA
tgctcagtcctacctttgcacc

SEQ ID NO: 14213 - RNA, 22 nt, synthetic construct
  source 1..22: mol_type = other RNA
ccggtccttgctgcagtctccc

SEQ ID NO: 14214 - RNA, 22 nt, synthetic construct
  source 1..22: mol_type = other RNA
tggaaaaattgccggtccttgc

SEQ ID NO: 14215 - RNA, 22 nt, synthetic construct
  source 1..22: mol_type = other RNA
ttctggaaaaattgccggtcct

SEQ ID NO: 14216 - RNA, 22 nt, synthetic construct
  source 1..22: mol_type = other RNA
ccatgctggggtcccctggcaa

SEQ ID NO: 14217 - RNA, 22 nt, synthetic construct
  source 1..22: mol_type = other RNA
aggttgccatgctggggtcccc

SEQ ID NO: 14218 - RNA, 22 nt, synthetic construct
  source 1..22: mol_type = other RNA
tctcgagtcagaaactagcatg

SEQ ID NO: 14219 - RNA, 22 nt, synthetic construct
  source 1..22: mol_type = other RNA
gtctcgagtcagaaactagcat

SEQ ID NO: 14220 - RNA, 22 nt, synthetic construct
  source 1..22: mol_type = other RNA
tttgtctcgagtcagaaactag

SEQ ID NO: 14221 - RNA, 22 nt, synthetic construct
  source 1..22: mol_type = other RNA
atttgtctcgagtcagaaacta

SEQ ID NO: 14222 - RNA, 22 nt, synthetic construct
  source 1..22: mol_type = other RNA
tctcctgagacgggacccctgt

SEQ ID NO: 14223 - RNA, 22 nt, synthetic construct
  source 1..22: mol_type = other RNA
cccgagcccaggtctgcttggg

SEQ ID NO: 14224 - RNA, 22 nt, synthetic construct
  source 1..22: mol_type = other RNA
caaaaaatcaaaaacaaaaaca

SEQ ID NO: 14225 - RNA, 22 nt, synthetic construct
  source 1..22: mol_type = other RNA
caagtgagccgagatcacacca

SEQ ID NO: 14226 - RNA, 22 nt, synthetic construct
  source 1..22: mol_type = other RNA
cttgaacctgggggaggtggag

SEQ ID NO: 14227 - RNA, 22 nt, synthetic construct
  source 1..22: mol_type = other RNA
cttgggaggctgaggcaggaga

SEQ ID NO: 14228 - RNA, 22 nt, synthetic construct
  source 1..22: mol_type = other RNA
tccaggtgtggtggtgcacgcc

SEQ ID NO: 14229 - RNA, 22 nt, synthetic construct
  source 1..22: mol_type = other RNA
gaaaccagcctggccaacatgg

SEQ ID NO: 14230 - RNA, 22 nt, synthetic construct
  source 1..22: mol_type = other RNA
ggagactgaggcgggcggatca

SEQ ID NO: 14231 - RNA, 22 nt, synthetic construct
  source 1..22: mol_type = other RNA
ctgcctcttaaagactcctgca

SEQ ID NO: 14232 - RNA, 22 nt, synthetic construct
  source 1..22: mol_type = other RNA
aaacacctgcatccttgttcct

SEQ ID NO: 14233 - RNA, 22 nt, synthetic construct
  source 1..22: mol_type = other RNA
agctgtggcaggtgagggtgtg

SEQ ID NO: 14234 - RNA, 22 nt, synthetic construct
  source 1..22: mol_type = other RNA
cagctgtggcaggtgagggtgt

SEQ ID NO: 14235 - RNA, 22 nt, synthetic construct
  source 1..22: mol_type = other RNA
gcacctgaaggcaccagggtag

SEQ ID NO: 14236 - RNA, 22 nt, synthetic construct
  source 1..22: mol_type = other RNA
actgatggcagaggatgcactt

SEQ ID NO: 14237 - RNA, 22 nt, synthetic construct
  source 1..22: mol_type = other RNA
gactgatggcagaggatgcact

SEQ ID NO: 14238 - RNA, 22 nt, synthetic construct
  source 1..22: mol_type = other RNA
ttgtccacaagacctgaacctg

SEQ ID NO: 14239 - RNA, 22 nt, synthetic construct
  source 1..22: mol_type = other RNA
agtaccaccttcctcatctaca

SEQ ID NO: 14240 - RNA, 22 nt, synthetic construct
  source 1..22: mol_type = other RNA
cagtaccaccttcctcatctac

SEQ ID NO: 14241 - RNA, 22 nt, synthetic construct
  source 1..22: mol_type = other RNA
gtttcagtaccaccttcctcat

SEQ ID NO: 14242 - RNA, 22 nt, synthetic construct
  source 1..22: mol_type = other RNA
gaacttagaatgggccagccag

SEQ ID NO: 14243 - RNA, 22 nt, synthetic construct
  source 1..22: mol_type = other RNA
tgatgtccccccatcccaccct

SEQ ID NO: 14244 - RNA, 22 nt, synthetic construct
  source 1..22: mol_type = other RNA
tcagagacagctggttctgatg

SEQ ID NO: 14245 - RNA, 22 nt, synthetic construct
  source 1..22: mol_type = other RNA
tgttctcagagacagctggttc

SEQ ID NO: 14246 - RNA, 22 nt, synthetic construct
  source 1..22: mol_type = other RNA
tcctatgacctggtgccacggg

SEQ ID NO: 14247 - RNA, 22 nt, synthetic construct
  source 1..22: mol_type = other RNA
taagaagtctcattatcctatg

SEQ ID NO: 14248 - RNA, 22 nt, synthetic construct
  source 1..22: mol_type = other RNA
cagtgagcttagatagtgccac

SEQ ID NO: 14249 - RNA, 22 nt, synthetic construct
  source 1..22: mol_type = other RNA
gcctgggcgtgatggtgcgtgt

SEQ ID NO: 14250 - RNA, 22 nt, synthetic construct
  source 1..22: mol_type = other RNA
tctactaaaaatacaaaaatta

SEQ ID NO: 14251 - RNA, 22 nt, synthetic construct
  source 1..22: mol_type = other RNA
aagaccagcctggccaacgtgg

SEQ ID NO: 14252 - RNA, 22 nt, synthetic construct
  source 1..22: mol_type = other RNA
aggtcaggagttgaagaccagc

SEQ ID NO: 14253 - RNA, 22 nt, synthetic construct
  source 1..22: mol_type = other RNA
gaggtcaggagttgaagaccag

SEQ ID NO: 14254 - RNA, 22 nt, synthetic construct
  source 1..22: mol_type = other RNA
ggaggctgaggtgggcagatca

SEQ ID NO: 14255 - RNA, 22 nt, synthetic construct
  source 1..22: mol_type = other RNA
taagaatgaccaggcacagtgg

SEQ ID NO: 14256 - RNA, 22 nt, synthetic construct
  source 1..22: mol_type = other RNA
aaacagccttgcttagtggggc

SEQ ID NO: 14257 - RNA, 22 nt, synthetic construct
  source 1..22: mol_type = other RNA
gaaacagccttgcttagtgggg

SEQ ID NO: 14258 - RNA, 22 nt, synthetic construct
  source 1..22: mol_type = other RNA
acaaataagaaatgctgagtca

SEQ ID NO: 14259 - RNA, 22 nt, synthetic construct
  source 1..22: mol_type = other RNA
agaagtccccgggtgaggagtg

SEQ ID NO: 14260 - RNA, 22 nt, synthetic construct
  source 1..22: mol_type = other RNA
cagaagtccccgggtgaggagt

SEQ ID NO: 14261 - RNA, 22 nt, synthetic construct
  source 1..22: mol_type = other RNA
tcagaagtccccgggtgaggag

SEQ ID NO: 14262 - RNA, 22 nt, synthetic construct
  source 1..22: mol_type = other RNA
aagccttcactgttttcagaag

SEQ ID NO: 14263 - RNA, 22 nt, synthetic construct
  source 1..22: mol_type = other RNA
ctttgaagccttcactgttttc

SEQ ID NO: 14264 - RNA, 22 nt, synthetic construct
  source 1..22: mol_type = other RNA
taaggtgattactttgaagcct

SEQ ID NO: 14265 - RNA, 22 nt, synthetic construct
  source 1..22: mol_type = other RNA
cccatgtgtgaaatgaggatga

SEQ ID NO: 14266 - RNA, 22 nt, synthetic construct
  source 1..22: mol_type = other RNA
ccccatgtgtgaaatgaggatg

SEQ ID NO: 14267 - RNA, 22 nt, synthetic construct
  source 1..22: mol_type = other RNA
cttcctctctgtggtcctcagt

SEQ ID NO: 14268 - RNA, 22 nt, synthetic construct
  source 1..22: mol_type = other RNA
ctgaaagagcactggacgggga

SEQ ID NO: 14269 - RNA, 22 nt, synthetic construct
  source 1..22: mol_type = other RNA
gctgaaagagcactggacgggg

SEQ ID NO: 14270 - RNA, 22 nt, synthetic construct
  source 1..22: mol_type = other RNA
tgctgaaagagcactggacggg

SEQ ID NO: 14271 - RNA, 22 nt, synthetic construct
  source 1..22: mol_type = other RNA
ttgctgaaagagcactggacgg

SEQ ID NO: 14272 - RNA, 22 nt, synthetic construct
  source 1..22: mol_type = other RNA
gaaacatgacttgtgtgcctca

SEQ ID NO: 14273 - RNA, 22 nt, synthetic construct
  source 1..22: mol_type = other RNA
ggaaacatgacttgtgtgcctc

SEQ ID NO: 14274 - RNA, 22 nt, synthetic construct
  source 1..22: mol_type = other RNA
tgtggaaaacacaaaaatgatg

SEQ ID NO: 14275 - RNA, 22 nt, synthetic construct
  source 1..22: mol_type = other RNA
aaaaaaaccctgtcataaataa

SEQ ID NO: 14276 - RNA, 22 nt, synthetic construct
  source 1..22: mol_type = other RNA
gaggctgcagtgagctatgatc

SEQ ID NO: 14277 - RNA, 22 nt, synthetic construct
  source 1..22: mol_type = other RNA
tacaaatgattttttaaaaatt

SEQ ID NO: 14278 - RNA, 22 nt, synthetic construct
  source 1..22: mol_type = other RNA
ctacaaatgattttttaaaaat

SEQ ID NO: 14279 - RNA, 22 nt, synthetic construct
  source 1..22: mol_type = other RNA
tctacaaatgattttttaaaaa

SEQ ID NO: 14280 - RNA, 22 nt, synthetic construct
  source 1..22: mol_type = other RNA
ttctacaaatgattttttaaaa

SEQ ID NO: 14281 - RNA, 22 nt, synthetic construct
  source 1..22: mol_type = other RNA
tcctacatccagctaatttttc

SEQ ID NO: 14282 - RNA, 22 nt, synthetic construct
  source 1..22: mol_type = other RNA
acgccattctcctacatccagc

SEQ ID NO: 14283 - RNA, 22 nt, synthetic construct
  source 1..22: mol_type = other RNA
gcccaggctggactgcagtggc

SEQ ID NO: 14284 - RNA, 22 nt, synthetic construct
  source 1..22: mol_type = other RNA
agacggagtcgcgctctttcgc

SEQ ID NO: 14285 - RNA, 22 nt, synthetic construct
  source 1..22: mol_type = other RNA
gagacggagtcgcgctctttcg

SEQ ID NO: 14286 - RNA, 22 nt, synthetic construct
  source 1..22: mol_type = other RNA
tgagacggagtcgcgctctttc

SEQ ID NO: 14287 - RNA, 22 nt, synthetic construct
  source 1..22: mol_type = other RNA
ttgagacggagtcgcgctcttt

SEQ ID NO: 14288 - RNA, 22 nt, synthetic construct
  source 1..22: mol_type = other RNA
tttgagacggagtcgcgctctt

SEQ ID NO: 14289 - RNA, 22 nt, synthetic construct
  source 1..22: mol_type = other RNA
tttttttgagacggagtcgcgc

SEQ ID NO: 14290 - RNA, 22 nt, synthetic construct
  source 1..22: mol_type = other RNA
ctttttttgagacggagtcgcg

SEQ ID NO: 14291 - RNA, 22 nt, synthetic construct
  source 1..22: mol_type = other RNA
tctttttttgagacggagtcgc

SEQ ID NO: 14292 - RNA, 22 nt, synthetic construct
  source 1..22: mol_type = other RNA
ttctttttttgagacggagtcg

SEQ ID NO: 14293 - RNA, 22 nt, synthetic construct
  source 1..22: mol_type = other RNA
tttctttttttgagacggagtc

SEQ ID NO: 14294 - RNA, 22 nt, synthetic construct
  source 1..22: mol_type = other RNA
tttttttctttttttgagacgg

SEQ ID NO: 14295 - RNA, 22 nt, synthetic construct
  source 1..22: mol_type = other RNA
ctttttttctttttttgagacg

SEQ ID NO: 14296 - RNA, 22 nt, synthetic construct
  source 1..22: mol_type = other RNA
caggcacctgccactatgtcca

SEQ ID NO: 14297 - RNA, 22 nt, synthetic construct
  source 1..22: mol_type = other RNA
tcctgcctcagcctcccgagca

SEQ ID NO: 14298 - RNA, 22 nt, synthetic construct
  source 1..22: mol_type = other RNA
aactgattctcctgcctcagcc

SEQ ID NO: 14299 - RNA, 22 nt, synthetic construct
  source 1..22: mol_type = other RNA
tgggttcaactgattctcctgc

SEQ ID NO: 14300 - RNA, 22 nt, synthetic construct
  source 1..22: mol_type = other RNA
ccaggctagagtgcaatggcat

SEQ ID NO: 14301 - RNA, 22 nt, synthetic construct
  source 1..22: mol_type = other RNA
actcttattgccaggctagagt

SEQ ID NO: 14302 - RNA, 22 nt, synthetic construct
  source 1..22: mol_type = other RNA
cactcttattgccaggctagag

SEQ ID NO: 14303 - RNA, 22 nt, synthetic construct
  source 1..22: mol_type = other RNA
gacggagtttcactcttattgc

SEQ ID NO: 14304 - RNA, 22 nt, synthetic construct
  source 1..22: mol_type = other RNA
agacggagtttcactcttattg

SEQ ID NO: 14305 - RNA, 22 nt, synthetic construct
  source 1..22: mol_type = other RNA
tagacggagtttcactcttatt

SEQ ID NO: 14306 - RNA, 22 nt, synthetic construct
  source 1..22: mol_type = other RNA
ttagacggagtttcactcttat

SEQ ID NO: 14307 - RNA, 22 nt, synthetic construct
  source 1..22: mol_type = other RNA
tttagacggagtttcactctta

SEQ ID NO: 14308 - RNA, 22 nt, synthetic construct
  source 1..22: mol_type = other RNA
ttttagacggagtttcactctt

SEQ ID NO: 14309 - RNA, 22 nt, synthetic construct
  source 1..22: mol_type = other RNA
tttttagacggagtttcactct

SEQ ID NO: 14310 - RNA, 22 nt, synthetic construct
  source 1..22: mol_type = other RNA
ttttttagacggagtttcactc

SEQ ID NO: 14311 - RNA, 22 nt, synthetic construct
  source 1..22: mol_type = other RNA
tttttttttagacggagtttca

SEQ ID NO: 14312 - RNA, 22 nt, synthetic construct
  source 1..22: mol_type = other RNA
gtttttttttagacggagtttc

SEQ ID NO: 14313 - RNA, 22 nt, synthetic construct
  source 1..22: mol_type = other RNA
tgtttttttttagacggagttt

SEQ ID NO: 14314 - RNA, 22 nt, synthetic construct
  source 1..22: mol_type = other RNA
ttgtttttttttagacggagtt

SEQ ID NO: 14315 - RNA, 22 nt, synthetic construct
  source 1..22: mol_type = other RNA
tttttgtttttttttagacgga

SEQ ID NO: 14316 - RNA, 22 nt, synthetic construct
  source 1..22: mol_type = other RNA
gtttttgtttttttttagacgg

SEQ ID NO: 14317 - RNA, 22 nt, synthetic construct
  source 1..22: mol_type = other RNA
tttgtttttgtttttttttaga

SEQ ID NO: 14318 - RNA, 22 nt, synthetic construct
  source 1..22: mol_type = other RNA
gtttgtttttgtttttttttag

SEQ ID NO: 14319 - RNA, 22 nt, synthetic construct
  source 1..22: mol_type = other RNA
gggttttttttgtttgtttttg

SEQ ID NO: 14320 - RNA, 22 nt, synthetic construct
  source 1..22: mol_type = other RNA
ttggggttttttttgtttgttt

SEQ ID NO: 14321 - RNA, 22 nt, synthetic construct
  source 1..22: mol_type = other RNA
gaggctagcctgggcaacatag

SEQ ID NO: 14322 - RNA, 22 nt, synthetic construct
  source 1..22: mol_type = other RNA
cttgaagccgggagttggaggc

SEQ ID NO: 14323 - RNA, 22 nt, synthetic construct
  source 1..22: mol_type = other RNA
ggaggccgaagcaggaggattg

SEQ ID NO: 14324 - RNA, 22 nt, synthetic construct
  source 1..22: mol_type = other RNA
gggaggccgaagcaggaggatt

SEQ ID NO: 14325 - RNA, 22 nt, synthetic construct
  source 1..22: mol_type = other RNA
tgggaggccgaagcaggaggat

SEQ ID NO: 14326 - RNA, 22 nt, synthetic construct
  source 1..22: mol_type = other RNA
caacattttgggaggccgaagc

SEQ ID NO: 14327 - RNA, 22 nt, synthetic construct
  source 1..22: mol_type = other RNA
aatataaagtagatggctgggc

SEQ ID NO: 14328 - RNA, 22 nt, synthetic construct
  source 1..22: mol_type = other RNA
gaatataaagtagatggctggg

SEQ ID NO: 14329 - RNA, 22 nt, synthetic construct
  source 1..22: mol_type = other RNA
tttgaatataaagtagatggct

SEQ ID NO: 14330 - RNA, 22 nt, synthetic construct
  source 1..22: mol_type = other RNA
atttgaatataaagtagatggc

SEQ ID NO: 14331 - RNA, 22 nt, synthetic construct
  source 1..22: mol_type = other RNA
tatttgaatataaagtagatgg

SEQ ID NO: 14332 - RNA, 22 nt, synthetic construct
  source 1..22: mol_type = other RNA
taatgggacgtaaagttttatt

SEQ ID NO: 14333 - RNA, 22 nt, synthetic construct
  source 1..22: mol_type = other RNA
cctttataatgggacgtaaagt

SEQ ID NO: 14334 - RNA, 22 nt, synthetic construct
  source 1..22: mol_type = other RNA
ccctttataatgggacgtaaag

SEQ ID NO: 14335 - RNA, 22 nt, synthetic construct
  source 1..22: mol_type = other RNA
tccctttataatgggacgtaaa

SEQ ID NO: 14336 - RNA, 22 nt, synthetic construct
  source 1..22: mol_type = other RNA
ttccctttataatgggacgtaa

SEQ ID NO: 14337 - RNA, 22 nt, synthetic construct
  source 1..22: mol_type = other RNA
tttccctttataatgggacgta

SEQ ID NO: 14338 - RNA, 22 nt, synthetic construct
  source 1..22: mol_type = other RNA
ccattttttccctttataatgg

SEQ ID NO: 14339 - RNA, 22 nt, synthetic construct
  source 1..22: mol_type = other RNA
gccattttttccctttataatg

SEQ ID NO: 14340 - RNA, 22 nt, synthetic construct
  source 1..22: mol_type = other RNA
tgccattttttccctttataat

SEQ ID NO: 14341 - RNA, 22 nt, synthetic construct
  source 1..22: mol_type = other RNA
ttgccattttttccctttataa

SEQ ID NO: 14342 - RNA, 22 nt, synthetic construct
  source 1..22: mol_type = other RNA
cctcctgtttttgccatttttt

SEQ ID NO: 14343 - RNA, 22 nt, synthetic construct
  source 1..22: mol_type = other RNA
aatggttacctcctgtttttgc

SEQ ID NO: 14344 - RNA, 22 nt, synthetic construct
  source 1..22: mol_type = other RNA
ttgttaaatggttacctcctgt

SEQ ID NO: 14345 - RNA, 22 nt, synthetic construct
  source 1..22: mol_type = other RNA
tagaaagcagctctctagcctc

SEQ ID NO: 14346 - RNA, 22 nt, synthetic construct
  source 1..22: mol_type = other RNA
atagaaagcagctctctagcct

SEQ ID NO: 14347 - RNA, 22 nt, synthetic construct
  source 1..22: mol_type = other RNA
tatagaaagcagctctctagcc

SEQ ID NO: 14348 - RNA, 22 nt, synthetic construct
  source 1..22: mol_type = other RNA
acacctcttctaatatatgatc

SEQ ID NO: 14349 - RNA, 22 nt, synthetic construct
  source 1..22: mol_type = other RNA
cagtctctgcccatcctcctgg

SEQ ID NO: 14350 - RNA, 22 nt, synthetic construct
  source 1..22: mol_type = other RNA
ccagtctctgcccatcctcctg

SEQ ID NO: 14351 - RNA, 22 nt, synthetic construct
  source 1..22: mol_type = other RNA
gtgtcttttccagtctctgccc

SEQ ID NO: 14352 - RNA, 22 nt, synthetic construct
  source 1..22: mol_type = other RNA
gggtgacccgccaaagtgatgc

SEQ ID NO: 14353 - RNA, 22 nt, synthetic construct
  source 1..22: mol_type = other RNA
ggggtgacccgccaaagtgatg

SEQ ID NO: 14354 - RNA, 22 nt, synthetic construct
  source 1..22: mol_type = other RNA
acccaaatatggtacccttgta

SEQ ID NO: 14355 - RNA, 22 nt, synthetic construct
  source 1..22: mol_type = other RNA
taccaaaagagtgttaacccaa

SEQ ID NO: 14356 - RNA, 22 nt, synthetic construct
  source 1..22: mol_type = other RNA
gactaaaacataaattatacca

SEQ ID NO: 14357 - RNA, 22 nt, synthetic construct
  source 1..22: mol_type = other RNA
atcccaagacattggactaaaa

SEQ ID NO: 14358 - RNA, 22 nt, synthetic construct
  source 1..22: mol_type = other RNA
catcccaagacattggactaaa

SEQ ID NO: 14359 - RNA, 22 nt, synthetic construct
  source 1..22: mol_type = other RNA
tcatcccaagacattggactaa

SEQ ID NO: 14360 - RNA, 22 nt, synthetic construct
  source 1..22: mol_type = other RNA
tctggagatcataagtggccca

SEQ ID NO: 14361 - RNA, 22 nt, synthetic construct
  source 1..22: mol_type = other RNA
ctctggagatcataagtggccc

SEQ ID NO: 14362 - RNA, 22 nt, synthetic construct
  source 1..22: mol_type = other RNA
ccctgaatttctctggagatca

SEQ ID NO: 14363 - RNA, 22 nt, synthetic construct
  source 1..22: mol_type = other RNA
agaaatgatgatcacaatggaa

SEQ ID NO: 14364 - RNA, 22 nt, synthetic construct
  source 1..22: mol_type = other RNA
ggggaaccttcaacagtctgac

SEQ ID NO: 14365 - RNA, 22 nt, synthetic construct
  source 1..22: mol_type = other RNA
cacagaaagtctgttgggggaa

SEQ ID NO: 14366 - RNA, 22 nt, synthetic construct
  source 1..22: mol_type = other RNA
gtgaagacagaaagttgcacag

SEQ ID NO: 14367 - RNA, 22 nt, synthetic construct
  source 1..22: mol_type = other RNA
ggtgaagacagaaagttgcaca

SEQ ID NO: 14368 - RNA, 22 nt, synthetic construct
  source 1..22: mol_type = other RNA
acttccttactgtggactgaat

SEQ ID NO: 14369 - RNA, 22 nt, synthetic construct
  source 1..22: mol_type = other RNA
cacttccttactgtggactgaa

SEQ ID NO: 14370 - RNA, 22 nt, synthetic construct
  source 1..22: mol_type = other RNA
atttcacttccttactgtggac

SEQ ID NO: 14371 - RNA, 22 nt, synthetic construct
  source 1..22: mol_type = other RNA
ccacactcccttaagccctccc

SEQ ID NO: 14372 - RNA, 22 nt, synthetic construct
  source 1..22: mol_type = other RNA
accacactcccttaagccctcc

SEQ ID NO: 14373 - RNA, 22 nt, synthetic construct
  source 1..22: mol_type = other RNA
taccacactcccttaagccctc

SEQ ID NO: 14374 - RNA, 22 nt, synthetic construct
  source 1..22: mol_type = other RNA
tgaacaccctctaattttacca

SEQ ID NO: 14375 - RNA, 22 nt, synthetic construct
  source 1..22: mol_type = other RNA
ctgaacaccctctaattttacc

SEQ ID NO: 14376 - RNA, 22 nt, synthetic construct
  source 1..22: mol_type = other RNA
tgtttctgaacaccctctaatt

SEQ ID NO: 14377 - RNA, 22 nt, synthetic construct
  source 1..22: mol_type = other RNA
ctgtttctgaacaccctctaat

SEQ ID NO: 14378 - RNA, 22 nt, synthetic construct
  source 1..22: mol_type = other RNA
ggagcccgccaagctaagccaa

SEQ ID NO: 14379 - RNA, 22 nt, synthetic construct
  source 1..22: mol_type = other RNA
tgtaggaatcccagccaggcag

SEQ ID NO: 14380 - RNA, 22 nt, synthetic construct
  source 1..22: mol_type = other RNA
ccttggggctctgacaggtagg

SEQ ID NO: 14381 - RNA, 22 nt, synthetic construct
  source 1..22: mol_type = other RNA
accttggggctctgacaggtag

SEQ ID NO: 14382 - RNA, 22 nt, synthetic construct
  source 1..22: mol_type = other RNA
taccttggggctctgacaggta

SEQ ID NO: 14383 - RNA, 22 nt, synthetic construct
  source 1..22: mol_type = other RNA
ccggcctttttaccttggggct

SEQ ID NO: 14384 - RNA, 22 nt, synthetic construct
  source 1..22: mol_type = other RNA
agatgctttcccggccttttta

SEQ ID NO: 14385 - RNA, 22 nt, synthetic construct
  source 1..22: mol_type = other RNA
tctggaatggcaggaccagctg

SEQ ID NO: 14386 - RNA, 22 nt, synthetic construct
  source 1..22: mol_type = other RNA
atctggaatggcaggaccagct

SEQ ID NO: 14387 - RNA, 22 nt, synthetic construct
  source 1..22: mol_type = other RNA
tctgtttatctggaatggcagg

SEQ ID NO: 14388 - RNA, 22 nt, synthetic construct
  source 1..22: mol_type = other RNA
ctctgtttatctggaatggcag

SEQ ID NO: 14389 - RNA, 22 nt, synthetic construct
  source 1..22: mol_type = other RNA
agaatggtttctctgtttatct

SEQ ID NO: 14390 - RNA, 22 nt, synthetic construct
  source 1..22: mol_type = other RNA
ccatcctcacccccatccccaa

SEQ ID NO: 14391 - RNA, 22 nt, synthetic construct
  source 1..22: mol_type = other RNA
acatcttccaatggcctgcccc

SEQ ID NO: 14392 - RNA, 22 nt, synthetic construct
  source 1..22: mol_type = other RNA
atactccagacacctggctgac

SEQ ID NO: 14393 - RNA, 22 nt, synthetic construct
  source 1..22: mol_type = other RNA
ggtgctgatacatggttcatac

SEQ ID NO: 14394 - RNA, 22 nt, synthetic construct
  source 1..22: mol_type = other RNA
gtgacacactgcccgaaagtct

SEQ ID NO: 14395 - RNA, 22 nt, synthetic construct
  source 1..22: mol_type = other RNA
cccaaagggaggcgagaagacc

SEQ ID NO: 14396 - RNA, 22 nt, synthetic construct
  source 1..22: mol_type = other RNA
acccaaagggaggcgagaagac

SEQ ID NO: 14397 - RNA, 22 nt, synthetic construct
  source 1..22: mol_type = other RNA
cctgcttctctgggtatggagt

SEQ ID NO: 14398 - RNA, 22 nt, synthetic construct
  source 1..22: mol_type = other RNA
ccctgcttctctgggtatggag

SEQ ID NO: 14399 - RNA, 22 nt, synthetic construct
  source 1..22: mol_type = other RNA
gtttccctgcttctctgggtat

SEQ ID NO: 14400 - RNA, 22 nt, synthetic construct
  source 1..22: mol_type = other RNA
ggtttccctgcttctctgggta

SEQ ID NO: 14401 - RNA, 22 nt, synthetic construct
  source 1..22: mol_type = other RNA
tggtttccctgcttctctgggt

SEQ ID NO: 14402 - RNA, 22 nt, synthetic construct
  source 1..22: mol_type = other RNA
ggaaactggggggagggcagca

SEQ ID NO: 14403 - RNA, 22 nt, synthetic construct
  source 1..22: mol_type = other RNA
aacaacaccattaggaaactgg

SEQ ID NO: 14404 - RNA, 22 nt, synthetic construct
  source 1..22: mol_type = other RNA
aaacaacaccattaggaaactg

SEQ ID NO: 14405 - RNA, 22 nt, synthetic construct
  source 1..22: mol_type = other RNA
taaacaacaccattaggaaact

SEQ ID NO: 14406 - RNA, 22 nt, synthetic construct
  source 1..22: mol_type = other RNA
ccccgtcccctgacccttttta

SEQ ID NO: 14407 - RNA, 22 nt, synthetic construct
  source 1..22: mol_type = other RNA
actcgagaatgtaaacgacttc

SEQ ID NO: 14408 - RNA, 22 nt, synthetic construct
  source 1..22: mol_type = other RNA
tacactccaggaaaattgactc

SEQ ID NO: 14409 - RNA, 22 nt, synthetic construct
  source 1..22: mol_type = other RNA
ccacaggtccattgtacactcc

SEQ ID NO: 14410 - RNA, 22 nt, synthetic construct
  source 1..22: mol_type = other RNA
atacaggctttcccacaggtcc

SEQ ID NO: 14411 - RNA, 22 nt, synthetic construct
  source 1..22: mol_type = other RNA
ccctttcatacaggctttccca

SEQ ID NO: 14412 - RNA, 22 nt, synthetic construct
  source 1..22: mol_type = other RNA
gacactgtgctaggtccctcat

SEQ ID NO: 14413 - RNA, 22 nt, synthetic construct
  source 1..22: mol_type = other RNA
ctataaaatattggacactgtg

SEQ ID NO: 14414 - RNA, 22 nt, synthetic construct
  source 1..22: mol_type = other RNA
cagttcctataaaatattggac

SEQ ID NO: 14415 - RNA, 22 nt, synthetic construct
  source 1..22: mol_type = other RNA
agctcctatgagctcaattcca

SEQ ID NO: 14416 - RNA, 22 nt, synthetic construct
  source 1..22: mol_type = other RNA
accatccaacaacagcaatgcc

SEQ ID NO: 14417 - RNA, 22 nt, synthetic construct
  source 1..22: mol_type = other RNA
aggggagtctgagaaaagggat

SEQ ID NO: 14418 - RNA, 22 nt, synthetic construct
  source 1..22: mol_type = other RNA
caggggagtctgagaaaaggga

SEQ ID NO: 14419 - RNA, 22 nt, synthetic construct
  source 1..22: mol_type = other RNA
aaagcaaaccatacatttcagg

SEQ ID NO: 14420 - RNA, 22 nt, synthetic construct
  source 1..22: mol_type = other RNA
ccgtagcaacttaaggctgcac

SEQ ID NO: 14421 - RNA, 22 nt, synthetic construct
  source 1..22: mol_type = other RNA
cctctgacttctccccctccaa

SEQ ID NO: 14422 - RNA, 22 nt, synthetic construct
  source 1..22: mol_type = other RNA
agggagggggcaaggttacctc

SEQ ID NO: 14423 - RNA, 22 nt, synthetic construct
  source 1..22: mol_type = other RNA
ctcatctggaattgagggaggg

SEQ ID NO: 14424 - RNA, 22 nt, synthetic construct
  source 1..22: mol_type = other RNA
cctcatctggaattgagggagg

SEQ ID NO: 14425 - RNA, 22 nt, synthetic construct
  source 1..22: mol_type = other RNA
aggcctgaatttcctcatctgg

SEQ ID NO: 14426 - RNA, 22 nt, synthetic construct
  source 1..22: mol_type = other RNA
caggcctgaatttcctcatctg

SEQ ID NO: 14427 - RNA, 22 nt, synthetic construct
  source 1..22: mol_type = other RNA
ccttttcaggcctgaatttcct

SEQ ID NO: 14428 - RNA, 22 nt, synthetic construct
  source 1..22: mol_type = other RNA
aggtggtcactttcccttttca

SEQ ID NO: 14429 - RNA, 22 nt, synthetic construct
  source 1..22: mol_type = other RNA
ctgctgggtcctccaaggcatg

SEQ ID NO: 14430 - RNA, 22 nt, synthetic construct
  source 1..22: mol_type = other RNA
agaggtcttggattcctgctgg

SEQ ID NO: 14431 - RNA, 22 nt, synthetic construct
  source 1..22: mol_type = other RNA
cagaggtcttggattcctgctg

SEQ ID NO: 14432 - RNA, 22 nt, synthetic construct
  source 1..22: mol_type = other RNA
ccatgaccacacccccagccgt

SEQ ID NO: 14433 - RNA, 22 nt, synthetic construct
  source 1..22: mol_type = other RNA
actcctctgatgctggccctag

SEQ ID NO: 14434 - RNA, 22 nt, synthetic construct
  source 1..22: mol_type = other RNA
tctccaactcagtccaaccgtg

SEQ ID NO: 14435 - RNA, 22 nt, synthetic construct
  source 1..22: mol_type = other RNA
ctctccaactcagtccaaccgt

SEQ ID NO: 14436 - RNA, 22 nt, synthetic construct
  source 1..22: mol_type = other RNA
cagggagcttgtccccacccct

SEQ ID NO: 14437 - RNA, 22 nt, synthetic construct
  source 1..22: mol_type = other RNA
ctcacagtggccagccccactt

SEQ ID NO: 14438 - RNA, 22 nt, synthetic construct
  source 1..22: mol_type = other RNA
tcagaagtggcatcccaactgc

SEQ ID NO: 14439 - RNA, 22 nt, synthetic construct
  source 1..22: mol_type = other RNA
tgcagcgctgagctcgggccag

SEQ ID NO: 14440 - RNA, 22 nt, synthetic construct
  source 1..22: mol_type = other RNA
tttctgcagcgctgagctcggg

SEQ ID NO: 14441 - RNA, 22 nt, synthetic construct
  source 1..22: mol_type = other RNA
actttctttctgcagcgctgag

SEQ ID NO: 14442 - RNA, 22 nt, synthetic construct
  source 1..22: mol_type = other RNA
cctttcactttctttctgcagc

SEQ ID NO: 14443 - RNA, 22 nt, synthetic construct
  source 1..22: mol_type = other RNA
ccctttcactttctttctgcag

SEQ ID NO: 14444 - RNA, 22 nt, synthetic construct
  source 1..22: mol_type = other RNA
tccctttcactttctttctgca

SEQ ID NO: 14445 - RNA, 22 nt, synthetic construct
  source 1..22: mol_type = other RNA
tttttccctttcactttctttc

SEQ ID NO: 14446 - RNA, 22 nt, synthetic construct
  source 1..22: mol_type = other RNA
cccgggctcccgcgcgcgctgc

SEQ ID NO: 14447 - RNA, 22 nt, synthetic construct
  source 1..22: mol_type = other RNA
gtcacctaccgctgttccccgg

SEQ ID NO: 14448 - RNA, 22 nt, synthetic construct
  source 1..22: mol_type = other RNA
cagaggagactttggtcaccta

SEQ ID NO: 14449 - RNA, 22 nt, synthetic construct
  source 1..22: mol_type = other RNA
tcagcccgaccttaggggttac

SEQ ID NO: 14450 - RNA, 22 nt, synthetic construct
  source 1..22: mol_type = other RNA
catccccccatcctcccagact

SEQ ID NO: 14451 - RNA, 22 nt, synthetic construct
  source 1..22: mol_type = other RNA
catattccatccccccatcctc

SEQ ID NO: 14452 - RNA, 22 nt, synthetic construct
  source 1..22: mol_type = other RNA
gcatattccatccccccatcct

SEQ ID NO: 14453 - RNA, 22 nt, synthetic construct
  source 1..22: mol_type = other RNA
tgcatattccatccccccatcc

SEQ ID NO: 14454 - RNA, 22 nt, synthetic construct
  source 1..22: mol_type = other RNA
ccggccctacattttgcatatt

SEQ ID NO: 14455 - RNA, 22 nt, synthetic construct
  source 1..22: mol_type = other RNA
cccggccctacattttgcatat

SEQ ID NO: 14456 - RNA, 22 nt, synthetic construct
  source 1..22: mol_type = other RNA
cggggatgctggaaacgaggtg

SEQ ID NO: 14457 - RNA, 22 nt, synthetic construct
  source 1..22: mol_type = other RNA
ccgcgcagagtcgttgcgggga

SEQ ID NO: 14458 - RNA, 22 nt, synthetic construct
  source 1..22: mol_type = other RNA
ccggctcctggttcccgcgcag

SEQ ID NO: 14459 - RNA, 22 nt, synthetic construct
  source 1..22: mol_type = other RNA
ctgccacccgcccacggccccg

SEQ ID NO: 14460 - RNA, 22 nt, synthetic construct
  source 1..22: mol_type = other RNA
gagatggaatatgacccaacag

SEQ ID NO: 14461 - RNA, 22 nt, synthetic construct
  source 1..22: mol_type = other RNA
cagagttagagatggaatatga

SEQ ID NO: 14462 - RNA, 22 nt, synthetic construct
  source 1..22: mol_type = other RNA
gctccctactgcctccctgagc

SEQ ID NO: 14463 - RNA, 22 nt, synthetic construct
  source 1..22: mol_type = other RNA
ggctccctactgcctccctgag

SEQ ID NO: 14464 - RNA, 22 nt, synthetic construct
  source 1..22: mol_type = other RNA
aaggtttggctccctactgcct

SEQ ID NO: 14465 - RNA, 22 nt, synthetic construct
  source 1..22: mol_type = other RNA
aggacttatcccatcctctggt

SEQ ID NO: 14466 - RNA, 22 nt, synthetic construct
  source 1..22: mol_type = other RNA
aacgagagttgaggacttatcc

SEQ ID NO: 14467 - RNA, 22 nt, synthetic construct
  source 1..22: mol_type = other RNA
agtccggggggatccctccccc

SEQ ID NO: 14468 - RNA, 22 nt, synthetic construct
  source 1..22: mol_type = other RNA
gcctctctccttagagggtgtg

SEQ ID NO: 14469 - RNA, 22 nt, synthetic construct
  source 1..22: mol_type = other RNA
cggggcgctttagcctctctcc

SEQ ID NO: 14470 - RNA, 22 nt, synthetic construct
  source 1..22: mol_type = other RNA
gcacgctggctttccggggcgc

SEQ ID NO: 14471 - RNA, 22 nt, synthetic construct
  source 1..22: mol_type = other RNA
ctggaccccagggagatccaat

SEQ ID NO: 14472 - RNA, 22 nt, synthetic construct
  source 1..22: mol_type = other RNA
cggctttcctggaccccaggga

SEQ ID NO: 14473 - RNA, 22 nt, synthetic construct
  source 1..22: mol_type = other RNA
cagactaagctaagcatggtgg

SEQ ID NO: 14474 - RNA, 22 nt, synthetic construct
  source 1..22: mol_type = other RNA
agagttccagactaagctaagc

SEQ ID NO: 14475 - RNA, 22 nt, synthetic construct
  source 1..22: mol_type = other RNA
aagagttccagactaagctaag

SEQ ID NO: 14476 - RNA, 22 nt, synthetic construct
  source 1..22: mol_type = other RNA
ccacctctcctgtgccacctag

SEQ ID NO: 14477 - RNA, 22 nt, synthetic construct
  source 1..22: mol_type = other RNA
gccacctctcctgtgccaccta

SEQ ID NO: 14478 - RNA, 22 nt, synthetic construct
  source 1..22: mol_type = other RNA
gacactccaggctgcggctggg

SEQ ID NO: 14479 - RNA, 22 nt, synthetic construct
  source 1..22: mol_type = other RNA
tctggagtggggagcagaaacg

SEQ ID NO: 14480 - RNA, 22 nt, synthetic construct
  source 1..22: mol_type = other RNA
ctctggagtggggagcagaaac

SEQ ID NO: 14481 - RNA, 22 nt, synthetic construct
  source 1..22: mol_type = other RNA
tctctggagtggggagcagaaa

SEQ ID NO: 14482 - RNA, 22 nt, synthetic construct
  source 1..22: mol_type = other RNA
ttctctggagtggggagcagaa

SEQ ID NO: 14483 - RNA, 22 nt, synthetic construct
  source 1..22: mol_type = other RNA
tttctctggagtggggagcaga

SEQ ID NO: 14484 - RNA, 22 nt, synthetic construct
  source 1..22: mol_type = other RNA
ttttttctctggagtggggagc

SEQ ID NO: 14485 - RNA, 22 nt, synthetic construct
  source 1..22: mol_type = other RNA
attttttctctggagtggggag

SEQ ID NO: 14486 - RNA, 22 nt, synthetic construct
  source 1..22: mol_type = other RNA
tttattttttctctggagtggg

SEQ ID NO: 14487 - RNA, 22 nt, synthetic construct
  source 1..22: mol_type = other RNA
atttattttttctctggagtgg

SEQ ID NO: 14488 - RNA, 22 nt, synthetic construct
  source 1..22: mol_type = other RNA
cttaatctcactccggagaagt

SEQ ID NO: 14489 - RNA, 22 nt, synthetic construct
  source 1..22: mol_type = other RNA
ccttaatctcactccggagaag

SEQ ID NO: 14490 - RNA, 22 nt, synthetic construct
  source 1..22: mol_type = other RNA
tccaagaggaagaagtacctgt

SEQ ID NO: 14491 - RNA, 22 nt, synthetic construct
  source 1..22: mol_type = other RNA
gctcctctttctccaagaggaa

SEQ ID NO: 14492 - RNA, 22 nt, synthetic construct
  source 1..22: mol_type = other RNA
ctttggctcctctttctccaag

SEQ ID NO: 14493 - RNA, 22 nt, synthetic construct
  source 1..22: mol_type = other RNA
gagtcaagttcctttggctcct

SEQ ID NO: 14494 - RNA, 22 nt, synthetic construct
  source 1..22: mol_type = other RNA
ttggagtcaagttcctttggct

SEQ ID NO: 14495 - RNA, 22 nt, synthetic construct
  source 1..22: mol_type = other RNA
gttggagtcaagttcctttggc

SEQ ID NO: 14496 - RNA, 22 nt, synthetic construct
  source 1..22: mol_type = other RNA
caaggtgatcatttgttggagt

SEQ ID NO: 14497 - RNA, 22 nt, synthetic construct
  source 1..22: mol_type = other RNA
gcaaggtgatcatttgttggag

SEQ ID NO: 14498 - RNA, 22 nt, synthetic construct
  source 1..22: mol_type = other RNA
gagaccaggtcatcccctaagg

SEQ ID NO: 14499 - RNA, 22 nt, synthetic construct
  source 1..22: mol_type = other RNA
ttggagaccaggtcatccccta

SEQ ID NO: 14500 - RNA, 22 nt, synthetic construct
  source 1..22: mol_type = other RNA
cccactcagtcatctccaaaga

SEQ ID NO: 14501 - RNA, 22 nt, synthetic construct
  source 1..22: mol_type = other RNA
atgtgtggggagcctgggattc

SEQ ID NO: 14502 - RNA, 22 nt, synthetic construct
  source 1..22: mol_type = other RNA
atcatcccaggtgatgttcatg

SEQ ID NO: 14503 - RNA, 22 nt, synthetic construct
  source 1..22: mol_type = other RNA
acctgcaggatctcagcctcac

SEQ ID NO: 14504 - RNA, 22 nt, synthetic construct
  source 1..22: mol_type = other RNA
aacctgcaggatctcagcctca

SEQ ID NO: 14505 - RNA, 22 nt, synthetic construct
  source 1..22: mol_type = other RNA
gagtcacctgggatagatggtt

SEQ ID NO: 14506 - RNA, 22 nt, synthetic construct
  source 1..22: mol_type = other RNA
ccccacaaacgaacattggagt

SEQ ID NO: 14507 - RNA, 22 nt, synthetic construct
  source 1..22: mol_type = other RNA
gccccacaaacgaacattggag

SEQ ID NO: 14508 - RNA, 22 nt, synthetic construct
  source 1..22: mol_type = other RNA
taacagggagagagtaaagaga

SEQ ID NO: 14509 - RNA, 22 nt, synthetic construct
  source 1..22: mol_type = other RNA
gtaacagggagagagtaaagag

SEQ ID NO: 14510 - RNA, 22 nt, synthetic construct
  source 1..22: mol_type = other RNA
tgtaacagggagagagtaaaga

SEQ ID NO: 14511 - RNA, 22 nt, synthetic construct
  source 1..22: mol_type = other RNA
tgatagaggttttgtaacaggg

SEQ ID NO: 14512 - RNA, 22 nt, synthetic construct
  source 1..22: mol_type = other RNA
ctgatagaggttttgtaacagg

SEQ ID NO: 14513 - RNA, 22 nt, synthetic construct
  source 1..22: mol_type = other RNA
agcaaaacaaaacaaaacacct

SEQ ID NO: 14514 - RNA, 22 nt, synthetic construct
  source 1..22: mol_type = other RNA
aaatcctgcgtctgcaaactgc

SEQ ID NO: 14515 - RNA, 22 nt, synthetic construct
  source 1..22: mol_type = other RNA
acatctgcttgctgcactgggc

SEQ ID NO: 14516 - RNA, 22 nt, synthetic construct
  source 1..22: mol_type = other RNA
tggaggttcacatctgcttgct

SEQ ID NO: 14517 - RNA, 22 nt, synthetic construct
  source 1..22: mol_type = other RNA
gtggaggttcacatctgcttgc

SEQ ID NO: 14518 - RNA, 22 nt, synthetic construct
  source 1..22: mol_type = other RNA
tctctgactgcctgggacctgc

SEQ ID NO: 14519 - RNA, 22 nt, synthetic construct
  source 1..22: mol_type = other RNA
ctctctgactgcctgggacctg

SEQ ID NO: 14520 - RNA, 22 nt, synthetic construct
  source 1..22: mol_type = other RNA
tgctcttctcaaggtatctgag

SEQ ID NO: 14521 - RNA, 22 nt, synthetic construct
  source 1..22: mol_type = other RNA
tgattctgctcttctcaaggta

SEQ ID NO: 14522 - RNA, 22 nt, synthetic construct
  source 1..22: mol_type = other RNA
ctgattctgctcttctcaaggt

SEQ ID NO: 14523 - RNA, 22 nt, synthetic construct
  source 1..22: mol_type = other RNA
atttctgattctgctcttctca

SEQ ID NO: 14524 - RNA, 22 nt, synthetic construct
  source 1..22: mol_type = other RNA
cttgggttaatttctgattctg

SEQ ID NO: 14525 - RNA, 22 nt, synthetic construct
  source 1..22: mol_type = other RNA
ccttgggttaatttctgattct

SEQ ID NO: 14526 - RNA, 22 nt, synthetic construct
  source 1..22: mol_type = other RNA
cctggaactaatccagagtttc

SEQ ID NO: 14527 - RNA, 22 nt, synthetic construct
  source 1..22: mol_type = other RNA
ctacctccctccagccacttcc

SEQ ID NO: 14528 - RNA, 22 nt, synthetic construct
  source 1..22: mol_type = other RNA
cctacctccctccagccacttc

SEQ ID NO: 14529 - RNA, 22 nt, synthetic construct
  source 1..22: mol_type = other RNA
cagatgaacctcagagagggga

SEQ ID NO: 14530 - RNA, 22 nt, synthetic construct
  source 1..22: mol_type = other RNA
acagatgaacctcagagagggg

SEQ ID NO: 14531 - RNA, 22 nt, synthetic construct
  source 1..22: mol_type = other RNA
tacagatgaacctcagagaggg

SEQ ID NO: 14532 - RNA, 22 nt, synthetic construct
  source 1..22: mol_type = other RNA
tccattttacagatgaacctca

SEQ ID NO: 14533 - RNA, 22 nt, synthetic construct
  source 1..22: mol_type = other RNA
atccattttacagatgaacctc

SEQ ID NO: 14534 - RNA, 22 nt, synthetic construct
  source 1..22: mol_type = other RNA
tatccattttacagatgaacct

SEQ ID NO: 14535 - RNA, 22 nt, synthetic construct
  source 1..22: mol_type = other RNA
tgtacacatcagacatcatcaa

SEQ ID NO: 14536 - RNA, 22 nt, synthetic construct
  source 1..22: mol_type = other RNA
ctgtacacatcagacatcatca

SEQ ID NO: 14537 - RNA, 22 nt, synthetic construct
  source 1..22: mol_type = other RNA
tctgtacacatcagacatcatc

SEQ ID NO: 14538 - RNA, 22 nt, synthetic construct
  source 1..22: mol_type = other RNA
taaagtgctttttctgtacaca

SEQ ID NO: 14539 - RNA, 22 nt, synthetic construct
  source 1..22: mol_type = other RNA
ctaaagtgctttttctgtacac

SEQ ID NO: 14540 - RNA, 22 nt, synthetic construct
  source 1..22: mol_type = other RNA
tctaaagtgctttttctgtaca

SEQ ID NO: 14541 - RNA, 22 nt, synthetic construct
  source 1..22: mol_type = other RNA
gtggttttctaaagtgcttttt

SEQ ID NO: 14542 - RNA, 22 nt, synthetic construct
  source 1..22: mol_type = other RNA
tttggtggttttctaaagtgct

SEQ ID NO: 14543 - RNA, 22 nt, synthetic construct
  source 1..22: mol_type = other RNA
ccaatgcatgaatattctttgg

SEQ ID NO: 14544 - RNA, 22 nt, synthetic construct
  source 1..22: mol_type = other RNA
ttcccaatgcatgaatattctt

SEQ ID NO: 14545 - RNA, 22 nt, synthetic construct
  source 1..22: mol_type = other RNA
ggatctataataattattccca

SEQ ID NO: 14546 - RNA, 22 nt, synthetic construct
  source 1..22: mol_type = other RNA
taaacaatccctttaggatcta

SEQ ID NO: 14547 - RNA, 22 nt, synthetic construct
  source 1..22: mol_type = other RNA
caggtgtgaaccactgctcccg

SEQ ID NO: 14548 - RNA, 22 nt, synthetic construct
  source 1..22: mol_type = other RNA
cccaggctggtcttgaactcct

SEQ ID NO: 14549 - RNA, 22 nt, synthetic construct
  source 1..22: mol_type = other RNA
tccaggttgcccaggctggtct

SEQ ID NO: 14550 - RNA, 22 nt, synthetic construct
  source 1..22: mol_type = other RNA
ctccaggttgcccaggctggtc

SEQ ID NO: 14551 - RNA, 22 nt, synthetic construct
  source 1..22: mol_type = other RNA
gggtttctccaggttgcccagg

SEQ ID NO: 14552 - RNA, 22 nt, synthetic construct
  source 1..22: mol_type = other RNA
gtagagttggggtttctccagg

SEQ ID NO: 14553 - RNA, 22 nt, synthetic construct
  source 1..22: mol_type = other RNA
agtagagttggggtttctccag

SEQ ID NO: 14554 - RNA, 22 nt, synthetic construct
  source 1..22: mol_type = other RNA
tagtagagttggggtttctcca

SEQ ID NO: 14555 - RNA, 22 nt, synthetic construct
  source 1..22: mol_type = other RNA
caggtgtgcaccaccatgcccg

SEQ ID NO: 14556 - RNA, 22 nt, synthetic construct
  source 1..22: mol_type = other RNA
agattacaggtgtgcaccacca

SEQ ID NO: 14557 - RNA, 22 nt, synthetic construct
  source 1..22: mol_type = other RNA
tcgtgcctcagcctcccaagta

SEQ ID NO: 14558 - RNA, 22 nt, synthetic construct
  source 1..22: mol_type = other RNA
aagtgattctcgtgcctcagcc

SEQ ID NO: 14559 - RNA, 22 nt, synthetic construct
  source 1..22: mol_type = other RNA
cccaggctggcgtgcagtggtg

SEQ ID NO: 14560 - RNA, 22 nt, synthetic construct
  source 1..22: mol_type = other RNA
ctgagacagtcttgctctgttg

SEQ ID NO: 14561 - RNA, 22 nt, synthetic construct
  source 1..22: mol_type = other RNA
cctgagacagtcttgctctgtt

SEQ ID NO: 14562 - RNA, 22 nt, synthetic construct
  source 1..22: mol_type = other RNA
tcctgagacagtcttgctctgt

SEQ ID NO: 14563 - RNA, 22 nt, synthetic construct
  source 1..22: mol_type = other RNA
ttcctgagacagtcttgctctg

SEQ ID NO: 14564 - RNA, 22 nt, synthetic construct
  source 1..22: mol_type = other RNA
tttcctgagacagtcttgctct

SEQ ID NO: 14565 - RNA, 22 nt, synthetic construct
  source 1..22: mol_type = other RNA
ttttcctgagacagtcttgctc

SEQ ID NO: 14566 - RNA, 22 nt, synthetic construct
  source 1..22: mol_type = other RNA
tttttcctgagacagtcttgct

SEQ ID NO: 14567 - RNA, 22 nt, synthetic construct
  source 1..22: mol_type = other RNA
ttttttcctgagacagtcttgc

SEQ ID NO: 14568 - RNA, 22 nt, synthetic construct
  source 1..22: mol_type = other RNA
tctctcttttttttttcctgag

SEQ ID NO: 14569 - RNA, 22 nt, synthetic construct
  source 1..22: mol_type = other RNA
ctctctcttttttttttcctga

SEQ ID NO: 14570 - RNA, 22 nt, synthetic construct
  source 1..22: mol_type = other RNA
tctctctcttttttttttcctg

SEQ ID NO: 14571 - RNA, 22 nt, synthetic construct
  source 1..22: mol_type = other RNA
ttctctctcttttttttttcct

SEQ ID NO: 14572 - RNA, 22 nt, synthetic construct
  source 1..22: mol_type = other RNA
ctctctgacttttttctctctc

SEQ ID NO: 14573 - RNA, 22 nt, synthetic construct
  source 1..22: mol_type = other RNA
gaaacctcccatctgcctatgc

SEQ ID NO: 14574 - RNA, 22 nt, synthetic construct
  source 1..22: mol_type = other RNA
actgtgtgtgtcttggtctttg

SEQ ID NO: 14575 - RNA, 22 nt, synthetic construct
  source 1..22: mol_type = other RNA
gactgtgtgtgtcttggtcttt

SEQ ID NO: 14576 - RNA, 22 nt, synthetic construct
  source 1..22: mol_type = other RNA
tgaactgtcttttgactgtgtg

SEQ ID NO: 14577 - RNA, 22 nt, synthetic construct
  source 1..22: mol_type = other RNA
aaggaatctgaaaactatctat

SEQ ID NO: 14578 - RNA, 22 nt, synthetic construct
  source 1..22: mol_type = other RNA
tccttgatgtcagaaggattga

SEQ ID NO: 14579 - RNA, 22 nt, synthetic construct
  source 1..22: mol_type = other RNA
gggcactgtcaaacatcaggga

SEQ ID NO: 14580 - RNA, 22 nt, synthetic construct
  source 1..22: mol_type = other RNA
aaaagaaatcttagcaagcatt

SEQ ID NO: 14581 - RNA, 22 nt, synthetic construct
  source 1..22: mol_type = other RNA
ttaaaaagaaatcttagcaagc

SEQ ID NO: 14582 - RNA, 22 nt, synthetic construct
  source 1..22: mol_type = other RNA
ccactttgttaaaaagaaatct

SEQ ID NO: 14583 - RNA, 22 nt, synthetic construct
  source 1..22: mol_type = other RNA
ctaaaataatctcagcttcttt

SEQ ID NO: 14584 - RNA, 22 nt, synthetic construct
  source 1..22: mol_type = other RNA
aaaaagaaacaatgttactaaa

SEQ ID NO: 14585 - RNA, 22 nt, synthetic construct
  source 1..22: mol_type = other RNA
catgtataaacggaaaagcaaa

SEQ ID NO: 14586 - RNA, 22 nt, synthetic construct
  source 1..22: mol_type = other RNA
ccatgtataaacggaaaagcaa

SEQ ID NO: 14587 - RNA, 22 nt, synthetic construct
  source 1..22: mol_type = other RNA
tccatgtataaacggaaaagca

SEQ ID NO: 14588 - RNA, 22 nt, synthetic construct
  source 1..22: mol_type = other RNA
ttccatgtataaacggaaaagc

SEQ ID NO: 14589 - RNA, 22 nt, synthetic construct
  source 1..22: mol_type = other RNA
tttccatgtataaacggaaaag

SEQ ID NO: 14590 - RNA, 22 nt, synthetic construct
  source 1..22: mol_type = other RNA
ttttccatgtataaacggaaaa

SEQ ID NO: 14591 - RNA, 22 nt, synthetic construct
  source 1..22: mol_type = other RNA
caaaaagaaaacttttttttcc

SEQ ID NO: 14592 - RNA, 22 nt, synthetic construct
  source 1..22: mol_type = other RNA
acaaaaagaaaacttttttttc

SEQ ID NO: 14593 - RNA, 22 nt, synthetic construct
  source 1..22: mol_type = other RNA
tacaaaaagaaaactttttttt

SEQ ID NO: 14594 - RNA, 22 nt, synthetic construct
  source 1..22: mol_type = other RNA
ccatgattttacaaaaagaaaa

SEQ ID NO: 14595 - RNA, 22 nt, synthetic construct
  source 1..22: mol_type = other RNA
accatgattttacaaaaagaaa

SEQ ID NO: 14596 - RNA, 22 nt, synthetic construct
  source 1..22: mol_type = other RNA
taccatgattttacaaaaagaa

SEQ ID NO: 14597 - RNA, 22 nt, synthetic construct
  source 1..22: mol_type = other RNA
tatgtattttaccatgatttta

SEQ ID NO: 14598 - RNA, 22 nt, synthetic construct
  source 1..22: mol_type = other RNA
tgttatatgtattttaccatga

SEQ ID NO: 14599 - RNA, 22 nt, synthetic construct
  source 1..22: mol_type = other RNA
atgttatatgtattttaccatg

SEQ ID NO: 14600 - RNA, 22 nt, synthetic construct
  source 1..22: mol_type = other RNA
tatgttatatgtattttaccat

SEQ ID NO: 14601 - RNA, 22 nt, synthetic construct
  source 1..22: mol_type = other RNA
aaatggtaaattttatgttata

SEQ ID NO: 14602 - RNA, 22 nt, synthetic construct
  source 1..22: mol_type = other RNA
aaagtggttaaaatggtaaatt

SEQ ID NO: 14603 - RNA, 22 nt, synthetic construct
  source 1..22: mol_type = other RNA
gaaagtggttaaaatggtaaat

SEQ ID NO: 14604 - RNA, 22 nt, synthetic construct
  source 1..22: mol_type = other RNA
atgccactgaaatgtacatttg

SEQ ID NO: 14605 - RNA, 22 nt, synthetic construct
  source 1..22: mol_type = other RNA
aatgccactgaaatgtacattt

SEQ ID NO: 14606 - RNA, 22 nt, synthetic construct
  source 1..22: mol_type = other RNA
aaatatttaatgccactgaaat

SEQ ID NO: 14607 - RNA, 22 nt, synthetic construct
  source 1..22: mol_type = other RNA
gaaatatttaatgccactgaaa

SEQ ID NO: 14608 - RNA, 22 nt, synthetic construct
  source 1..22: mol_type = other RNA
cacaacagtttgaaatatttaa

SEQ ID NO: 14609 - RNA, 22 nt, synthetic construct
  source 1..22: mol_type = other RNA
tggagatggatggtagcggagg

SEQ ID NO: 14610 - RNA, 22 nt, synthetic construct
  source 1..22: mol_type = other RNA
ggaggatgaaaaagttctggag

SEQ ID NO: 14611 - RNA, 22 nt, synthetic construct
  source 1..22: mol_type = other RNA
gggaggatgaaaaagttctgga

SEQ ID NO: 14612 - RNA, 22 nt, synthetic construct
  source 1..22: mol_type = other RNA
agtttgggaggatgaaaaagtt

SEQ ID NO: 14613 - RNA, 22 nt, synthetic construct
  source 1..22: mol_type = other RNA
cagtttgggaggatgaaaaagt

SEQ ID NO: 14614 - RNA, 22 nt, synthetic construct
  source 1..22: mol_type = other RNA
ggtagagtttcagtttgggagg

SEQ ID NO: 14615 - RNA, 22 nt, synthetic construct
  source 1..22: mol_type = other RNA
cttattgggtagagtttcagtt

SEQ ID NO: 14616 - RNA, 22 nt, synthetic construct
  source 1..22: mol_type = other RNA
ttgcttattgggtagagtttca

SEQ ID NO: 14617 - RNA, 22 nt, synthetic construct
  source 1..22: mol_type = other RNA
ccacgagctgggtggaaggggc

SEQ ID NO: 14618 - RNA, 22 nt, synthetic construct
  source 1..22: mol_type = other RNA
gagttaccacgagctgggtgga

SEQ ID NO: 14619 - RNA, 22 nt, synthetic construct
  source 1..22: mol_type = other RNA
taggcggtgtctagagtagccc

SEQ ID NO: 14620 - RNA, 22 nt, synthetic construct
  source 1..22: mol_type = other RNA
ataggcggtgtctagagtagcc

SEQ ID NO: 14621 - RNA, 22 nt, synthetic construct
  source 1..22: mol_type = other RNA
tatttataggcggtgtctagag

SEQ ID NO: 14622 - RNA, 22 nt, synthetic construct
  source 1..22: mol_type = other RNA
tgctaagtgaaagaagccaggc

SEQ ID NO: 14623 - RNA, 22 nt, synthetic construct
  source 1..22: mol_type = other RNA
cacatggcacgacatggatgaa

SEQ ID NO: 14624 - RNA, 22 nt, synthetic construct
  source 1..22: mol_type = other RNA
cgccatagaaaggaattacaca

SEQ ID NO: 14625 - RNA, 22 nt, synthetic construct
  source 1..22: mol_type = other RNA
gaatactattccgccatagaaa

SEQ ID NO: 14626 - RNA, 22 nt, synthetic construct
  source 1..22: mol_type = other RNA
acaatagtcaagaggtaggaac

SEQ ID NO: 14627 - RNA, 22 nt, synthetic construct
  source 1..22: mol_type = other RNA
ttcacaatagtcaagaggtagg

SEQ ID NO: 14628 - RNA, 22 nt, synthetic construct
  source 1..22: mol_type = other RNA
tccacccatgtacctagcaaga

SEQ ID NO: 14629 - RNA, 22 nt, synthetic construct
  source 1..22: mol_type = other RNA
gtccacccatgtacctagcaag

SEQ ID NO: 14630 - RNA, 22 nt, synthetic construct
  source 1..22: mol_type = other RNA
aaagcggggagtcagacagata

SEQ ID NO: 14631 - RNA, 22 nt, synthetic construct
  source 1..22: mol_type = other RNA
tagagttgaaagcggggagtca

SEQ ID NO: 14632 - RNA, 22 nt, synthetic construct
  source 1..22: mol_type = other RNA
aaagaaagctttctagagttga

SEQ ID NO: 14633 - RNA, 22 nt, synthetic construct
  source 1..22: mol_type = other RNA
aaaagaaagctttctagagttg

SEQ ID NO: 14634 - RNA, 22 nt, synthetic construct
  source 1..22: mol_type = other RNA
taaaagaaagctttctagagtt

SEQ ID NO: 14635 - RNA, 22 nt, synthetic construct
  source 1..22: mol_type = other RNA
aagaaacttaaatagaccgatt

SEQ ID NO: 14636 - RNA, 22 nt, synthetic construct
  source 1..22: mol_type = other RNA
aaagaaacttaaatagaccgat

SEQ ID NO: 14637 - RNA, 22 nt, synthetic construct
  source 1..22: mol_type = other RNA
taaagaaacttaaatagaccga

SEQ ID NO: 14638 - RNA, 22 nt, synthetic construct
  source 1..22: mol_type = other RNA
actttttaaagaaacttaaata

SEQ ID NO: 14639 - RNA, 22 nt, synthetic construct
  source 1..22: mol_type = other RNA
ttaaattaactttttaaagaaa

SEQ ID NO: 14640 - RNA, 22 nt, synthetic construct
  source 1..22: mol_type = other RNA
cttaaattaactttttaaagaa

SEQ ID NO: 14641 - RNA, 22 nt, synthetic construct
  source 1..22: mol_type = other RNA
tcttaaattaactttttaaaga

SEQ ID NO: 14642 - RNA, 22 nt, synthetic construct
  source 1..22: mol_type = other RNA
ttcttaaattaactttttaaag

SEQ ID NO: 14643 - RNA, 22 nt, synthetic construct
  source 1..22: mol_type = other RNA
ccttagtatttttcttaaatta

SEQ ID NO: 14644 - RNA, 22 nt, synthetic construct
  source 1..22: mol_type = other RNA
accttagtatttttcttaaatt

SEQ ID NO: 14645 - RNA, 22 nt, synthetic construct
  source 1..22: mol_type = other RNA
tacaatttaccttagtattttt

SEQ ID NO: 14646 - RNA, 22 nt, synthetic construct
  source 1..22: mol_type = other RNA
acatatcacctgttctacaatt

SEQ ID NO: 14647 - RNA, 22 nt, synthetic construct
  source 1..22: mol_type = other RNA
gggtcatattgacatatcacct

SEQ ID NO: 14648 - RNA, 22 nt, synthetic construct
  source 1..22: mol_type = other RNA
ggggtcatattgacatatcacc

SEQ ID NO: 14649 - RNA, 22 nt, synthetic construct
  source 1..22: mol_type = other RNA
tggggtcatattgacatatcac

SEQ ID NO: 14650 - RNA, 22 nt, synthetic construct
  source 1..22: mol_type = other RNA
ttggggtcatattgacatatca

SEQ ID NO: 14651 - RNA, 22 nt, synthetic construct
  source 1..22: mol_type = other RNA
caatttttggggtcatattgac

SEQ ID NO: 14652 - RNA, 22 nt, synthetic construct
  source 1..22: mol_type = other RNA
gtcttccatctttacaattttt

SEQ ID NO: 14653 - RNA, 22 nt, synthetic construct
  source 1..22: mol_type = other RNA
ccaaactgcaggcattcgtctt

SEQ ID NO: 14654 - RNA, 22 nt, synthetic construct
  source 1..22: mol_type = other RNA
cccaaactgcaggcattcgtct

SEQ ID NO: 14655 - RNA, 22 nt, synthetic construct
  source 1..22: mol_type = other RNA
ctctcatccggtttcccaaact

SEQ ID NO: 14656 - RNA, 22 nt, synthetic construct
  source 1..22: mol_type = other RNA
caatagcttccaggtctttcct

SEQ ID NO: 14657 - RNA, 22 nt, synthetic construct
  source 1..22: mol_type = other RNA
acaatagcttccaggtctttcc

SEQ ID NO: 14658 - RNA, 22 nt, synthetic construct
  source 1..22: mol_type = other RNA
tacaatagcttccaggtctttc

SEQ ID NO: 14659 - RNA, 22 nt, synthetic construct
  source 1..22: mol_type = other RNA
agctgccctctgctgccatgcc

SEQ ID NO: 14660 - RNA, 22 nt, synthetic construct
  source 1..22: mol_type = other RNA
cttcctgaagtctttcagctgc

SEQ ID NO: 14661 - RNA, 22 nt, synthetic construct
  source 1..22: mol_type = other RNA
ttatatctttccttcctgaagt

SEQ ID NO: 14662 - RNA, 22 nt, synthetic construct
  source 1..22: mol_type = other RNA
ttaattcttatatctttccttc

SEQ ID NO: 14663 - RNA, 22 nt, synthetic construct
  source 1..22: mol_type = other RNA
caggcatgagccactgcaccag

SEQ ID NO: 14664 - RNA, 22 nt, synthetic construct
  source 1..22: mol_type = other RNA
cccaggctggtcttgaactcct

SEQ ID NO: 14665 - RNA, 22 nt, synthetic construct
  source 1..22: mol_type = other RNA
ctaaaaaaaggtcttgctctgt

SEQ ID NO: 14666 - RNA, 22 nt, synthetic construct
  source 1..22: mol_type = other RNA
cctaaaaaaaggtcttgctctg

SEQ ID NO: 14667 - RNA, 22 nt, synthetic construct
  source 1..22: mol_type = other RNA
tcctaaaaaaaggtcttgctct

SEQ ID NO: 14668 - RNA, 22 nt, synthetic construct
  source 1..22: mol_type = other RNA
ttcctaaaaaaaggtcttgctc

SEQ ID NO: 14669 - RNA, 22 nt, synthetic construct
  source 1..22: mol_type = other RNA
tttcctaaaaaaaggtcttgct

SEQ ID NO: 14670 - RNA, 22 nt, synthetic construct
  source 1..22: mol_type = other RNA
ttttcctaaaaaaaggtcttgc

SEQ ID NO: 14671 - RNA, 22 nt, synthetic construct
  source 1..22: mol_type = other RNA
tatatttttttcctaaaaaaag

SEQ ID NO: 14672 - RNA, 22 nt, synthetic construct
  source 1..22: mol_type = other RNA
atatatttttttcctaaaaaaa

SEQ ID NO: 14673 - RNA, 22 nt, synthetic construct
  source 1..22: mol_type = other RNA
atttatatatttttttcctaaa

SEQ ID NO: 14674 - RNA, 22 nt, synthetic construct
  source 1..22: mol_type = other RNA
ttaatttatatatttttttcct

SEQ ID NO: 14675 - RNA, 22 nt, synthetic construct
  source 1..22: mol_type = other RNA
attaatttatatatttttttcc

SEQ ID NO: 14676 - RNA, 22 nt, synthetic construct
  source 1..22: mol_type = other RNA
tattaatttatatatttttttc

SEQ ID NO: 14677 - RNA, 22 nt, synthetic construct
  source 1..22: mol_type = other RNA
ttattaatttatatattttttt

SEQ ID NO: 14678 - RNA, 22 nt, synthetic construct
  source 1..22: mol_type = other RNA
tttttattaatttatatatttt

SEQ ID NO: 14679 - RNA, 22 nt, synthetic construct
  source 1..22: mol_type = other RNA
atttttattaatttatatattt

SEQ ID NO: 14680 - RNA, 22 nt, synthetic construct
  source 1..22: mol_type = other RNA
aaaaatttatttttattaattt

SEQ ID NO: 14681 - RNA, 22 nt, synthetic construct
  source 1..22: mol_type = other RNA
caaaaatttatttttattaatt

SEQ ID NO: 14682 - RNA, 22 nt, synthetic construct
  source 1..22: mol_type = other RNA
tcaaaaatttatttttattaat

SEQ ID NO: 14683 - RNA, 22 nt, synthetic construct
  source 1..22: mol_type = other RNA
caggtgtgagccaccatgcccg

SEQ ID NO: 14684 - RNA, 22 nt, synthetic construct
  source 1..22: mol_type = other RNA
cccaggctggtctcgaactcct

SEQ ID NO: 14685 - RNA, 22 nt, synthetic construct
  source 1..22: mol_type = other RNA
accatgttgcccaggctggtct

SEQ ID NO: 14686 - RNA, 22 nt, synthetic construct
  source 1..22: mol_type = other RNA
caccatgttgcccaggctggtc

SEQ ID NO: 14687 - RNA, 22 nt, synthetic construct
  source 1..22: mol_type = other RNA
ggagagacggtgtttcaccatg

SEQ ID NO: 14688 - RNA, 22 nt, synthetic construct
  source 1..22: mol_type = other RNA
aggagagacggtgtttcaccat

SEQ ID NO: 14689 - RNA, 22 nt, synthetic construct
  source 1..22: mol_type = other RNA
taggagagacggtgtttcacca

SEQ ID NO: 14690 - RNA, 22 nt, synthetic construct
  source 1..22: mol_type = other RNA
ttaggagagacggtgtttcacc

SEQ ID NO: 14691 - RNA, 22 nt, synthetic construct
  source 1..22: mol_type = other RNA
tatttttaggagagacggtgtt

SEQ ID NO: 14692 - RNA, 22 nt, synthetic construct
  source 1..22: mol_type = other RNA
gtatttttaggagagacggtgt

SEQ ID NO: 14693 - RNA, 22 nt, synthetic construct
  source 1..22: mol_type = other RNA
tgtatttttaggagagacggtg

SEQ ID NO: 14694 - RNA, 22 nt, synthetic construct
  source 1..22: mol_type = other RNA
caggcatgcaccactacacccg

SEQ ID NO: 14695 - RNA, 22 nt, synthetic construct
  source 1..22: mol_type = other RNA
tcctccaccagcctaccgagta

SEQ ID NO: 14696 - RNA, 22 nt, synthetic construct
  source 1..22: mol_type = other RNA
aggcgattctcctccaccagcc

SEQ ID NO: 14697 - RNA, 22 nt, synthetic construct
  source 1..22: mol_type = other RNA
cccaggctggagtgcaatggtg

SEQ ID NO: 14698 - RNA, 22 nt, synthetic construct
  source 1..22: mol_type = other RNA
actcttgttgcccaggctggag

SEQ ID NO: 14699 - RNA, 22 nt, synthetic construct
  source 1..22: mol_type = other RNA
cactcttgttgcccaggctgga

SEQ ID NO: 14700 - RNA, 22 nt, synthetic construct
  source 1..22: mol_type = other RNA
agacggagtttcactcttgttg

SEQ ID NO: 14701 - RNA, 22 nt, synthetic construct
  source 1..22: mol_type = other RNA
gagacggagtttcactcttgtt

SEQ ID NO: 14702 - RNA, 22 nt, synthetic construct
  source 1..22: mol_type = other RNA
tgagacggagtttcactcttgt

SEQ ID NO: 14703 - RNA, 22 nt, synthetic construct
  source 1..22: mol_type = other RNA
ttgagacggagtttcactcttg

SEQ ID NO: 14704 - RNA, 22 nt, synthetic construct
  source 1..22: mol_type = other RNA
tttgagacggagtttcactctt

SEQ ID NO: 14705 - RNA, 22 nt, synthetic construct
  source 1..22: mol_type = other RNA
ttttgagacggagtttcactct

SEQ ID NO: 14706 - RNA, 22 nt, synthetic construct
  source 1..22: mol_type = other RNA
tttttgagacggagtttcactc

SEQ ID NO: 14707 - RNA, 22 nt, synthetic construct
  source 1..22: mol_type = other RNA
attttttttgagacggagtttc

SEQ ID NO: 14708 - RNA, 22 nt, synthetic construct
  source 1..22: mol_type = other RNA
tttcattttttttgagacggag

SEQ ID NO: 14709 - RNA, 22 nt, synthetic construct
  source 1..22: mol_type = other RNA
ctttcattttttttgagacgga

SEQ ID NO: 14710 - RNA, 22 nt, synthetic construct
  source 1..22: mol_type = other RNA
tctttcattttttttgagacgg

SEQ ID NO: 14711 - RNA, 22 nt, synthetic construct
  source 1..22: mol_type = other RNA
agggagtctgcagccgggccca

SEQ ID NO: 14712 - RNA, 22 nt, synthetic construct
  source 1..22: mol_type = other RNA
tattcagggagtctgcagccgg

SEQ ID NO: 14713 - RNA, 22 nt, synthetic construct
  source 1..22: mol_type = other RNA
aaaacacagcgtcctgggcctc

SEQ ID NO: 14714 - RNA, 22 nt, synthetic construct
  source 1..22: mol_type = other RNA
cctgggaagggtgttaaaaaca

SEQ ID NO: 14715 - RNA, 22 nt, synthetic construct
  source 1..22: mol_type = other RNA
gcaaagccaggccccacactcc

SEQ ID NO: 14716 - RNA, 22 nt, synthetic construct
  source 1..22: mol_type = other RNA
ctggaagggaacctgaccctgg

SEQ ID NO: 14717 - RNA, 22 nt, synthetic construct
  source 1..22: mol_type = other RNA
cctggaagggaacctgaccctg

SEQ ID NO: 14718 - RNA, 22 nt, synthetic construct
  source 1..22: mol_type = other RNA
tcctggaagggaacctgaccct

SEQ ID NO: 14719 - RNA, 22 nt, synthetic construct
  source 1..22: mol_type = other RNA
ttcctggaagggaacctgaccc

SEQ ID NO: 14720 - RNA, 22 nt, synthetic construct
  source 1..22: mol_type = other RNA
ccttccccgcttgcctggtctg

SEQ ID NO: 14721 - RNA, 22 nt, synthetic construct
  source 1..22: mol_type = other RNA
ggataagagttcccttccccgc

SEQ ID NO: 14722 - RNA, 22 nt, synthetic construct
  source 1..22: mol_type = other RNA
tgggtgaggggcctggtggtcc

SEQ ID NO: 14723 - RNA, 22 nt, synthetic construct
  source 1..22: mol_type = other RNA
ttgtgggtgaggggcctggtgg

SEQ ID NO: 14724 - RNA, 22 nt, synthetic construct
  source 1..22: mol_type = other RNA
ccagtaaagggtaaagttattg

SEQ ID NO: 14725 - RNA, 22 nt, synthetic construct
  source 1..22: mol_type = other RNA
gccagtaaagggtaaagttatt

SEQ ID NO: 14726 - RNA, 22 nt, synthetic construct
  source 1..22: mol_type = other RNA
aggacactgacctcataacaac

SEQ ID NO: 14727 - RNA, 22 nt, synthetic construct
  source 1..22: mol_type = other RNA
aggcaagccacctatcttctct

SEQ ID NO: 14728 - RNA, 22 nt, synthetic construct
  source 1..22: mol_type = other RNA
ctccaagagggacgtggaaatc

SEQ ID NO: 14729 - RNA, 22 nt, synthetic construct
  source 1..22: mol_type = other RNA
cctccaagagggacgtggaaat

SEQ ID NO: 14730 - RNA, 22 nt, synthetic construct
  source 1..22: mol_type = other RNA
tcctccaagagggacgtggaaa

SEQ ID NO: 14731 - RNA, 22 nt, synthetic construct
  source 1..22: mol_type = other RNA
ttcctccaagagggacgtggaa

SEQ ID NO: 14732 - RNA, 22 nt, synthetic construct
  source 1..22: mol_type = other RNA
cctcctgtgaatgtccccagta

SEQ ID NO: 14733 - RNA, 22 nt, synthetic construct
  source 1..22: mol_type = other RNA
cttcgggtgttccctcctgtga

SEQ ID NO: 14734 - RNA, 22 nt, synthetic construct
  source 1..22: mol_type = other RNA
ccttcgggtgttccctcctgtg

SEQ ID NO: 14735 - RNA, 22 nt, synthetic construct
  source 1..22: mol_type = other RNA
ttcccttttccttcgggtgttc

SEQ ID NO: 14736 - RNA, 22 nt, synthetic construct
  source 1..22: mol_type = other RNA
cacctcaactcctgctgcttcc

SEQ ID NO: 14737 - RNA, 22 nt, synthetic construct
  source 1..22: mol_type = other RNA
tgactgcattgcacctcaactc

SEQ ID NO: 14738 - RNA, 22 nt, synthetic construct
  source 1..22: mol_type = other RNA
gctaagacctctgttgtgactg

SEQ ID NO: 14739 - RNA, 22 nt, synthetic construct
  source 1..22: mol_type = other RNA
atcatgggggaggctatgcctg

SEQ ID NO: 14740 - RNA, 22 nt, synthetic construct
  source 1..22: mol_type = other RNA
taacaaatgtatcagtctggtg

SEQ ID NO: 14741 - RNA, 22 nt, synthetic construct
  source 1..22: mol_type = other RNA
attataacaaatgtatcagtct

SEQ ID NO: 14742 - RNA, 22 nt, synthetic construct
  source 1..22: mol_type = other RNA
attgattataacaaatgtatca

SEQ ID NO: 14743 - RNA, 22 nt, synthetic construct
  source 1..22: mol_type = other RNA
catcatgtatctgtccaaaccc

SEQ ID NO: 14744 - RNA, 22 nt, synthetic construct
  source 1..22: mol_type = other RNA
aagaaagaaggacaagctcagt

SEQ ID NO: 14745 - RNA, 22 nt, synthetic construct
  source 1..22: mol_type = other RNA
gaggcaggttaaagaaagaagg

SEQ ID NO: 14746 - RNA, 22 nt, synthetic construct
  source 1..22: mol_type = other RNA
gctgcaatccctagccaaaggg

SEQ ID NO: 14747 - RNA, 22 nt, synthetic construct
  source 1..22: mol_type = other RNA
aaattggctgcaatccctagcc

SEQ ID NO: 14748 - RNA, 22 nt, synthetic construct
  source 1..22: mol_type = other RNA
aaccaaccagcctctggcaaac

SEQ ID NO: 14749 - RNA, 22 nt, synthetic construct
  source 1..22: mol_type = other RNA
gaaccaaccagcctctggcaaa

SEQ ID NO: 14750 - RNA, 22 nt, synthetic construct
  source 1..22: mol_type = other RNA
ggtttgaaccaaccagcctctg

SEQ ID NO: 14751 - RNA, 22 nt, synthetic construct
  source 1..22: mol_type = other RNA
cagctccctgccctttgggttt

SEQ ID NO: 14752 - RNA, 22 nt, synthetic construct
  source 1..22: mol_type = other RNA
cattgcagctccctgccctttg

SEQ ID NO: 14753 - RNA, 22 nt, synthetic construct
  source 1..22: mol_type = other RNA
ccattgcagctccctgcccttt

SEQ ID NO: 14754 - RNA, 22 nt, synthetic construct
  source 1..22: mol_type = other RNA
aatggatttccattgcagctcc

SEQ ID NO: 14755 - RNA, 22 nt, synthetic construct
  source 1..22: mol_type = other RNA
cagcaccgttgaatggatttcc

SEQ ID NO: 14756 - RNA, 22 nt, synthetic construct
  source 1..22: mol_type = other RNA
ccatcccaattccagcaccgtt

SEQ ID NO: 14757 - RNA, 22 nt, synthetic construct
  source 1..22: mol_type = other RNA
gccatcccaattccagcaccgt

SEQ ID NO: 14758 - RNA, 22 nt, synthetic construct
  source 1..22: mol_type = other RNA
tgccatcccaattccagcaccg

SEQ ID NO: 14759 - RNA, 22 nt, synthetic construct
  source 1..22: mol_type = other RNA
tctcataaatgaaaggatgaat

SEQ ID NO: 14760 - RNA, 22 nt, synthetic construct
  source 1..22: mol_type = other RNA
gctgggtgtggtggagtgccct

SEQ ID NO: 14761 - RNA, 22 nt, synthetic construct
  source 1..22: mol_type = other RNA
agaccagcctgggcaacatagt

SEQ ID NO: 14762 - RNA, 22 nt, synthetic construct
  source 1..22: mol_type = other RNA
gagaccagcctgggcaacatag

SEQ ID NO: 14763 - RNA, 22 nt, synthetic construct
  source 1..22: mol_type = other RNA
ggaggctgaggagggaggatga

SEQ ID NO: 14764 - RNA, 22 nt, synthetic construct
  source 1..22: mol_type = other RNA
agaggtaagctgtctgagatca

SEQ ID NO: 14765 - RNA, 22 nt, synthetic construct
  source 1..22: mol_type = other RNA
ccagctctgctgccagctcaga

SEQ ID NO: 14766 - RNA, 22 nt, synthetic construct
  source 1..22: mol_type = other RNA
ggtgcactttcccagctctgct

SEQ ID NO: 14767 - RNA, 22 nt, synthetic construct
  source 1..22: mol_type = other RNA
cagcatctggggtgttgggtgc

SEQ ID NO: 14768 - RNA, 22 nt, synthetic construct
  source 1..22: mol_type = other RNA
cacacagagaaggagcaggaag

SEQ ID NO: 14769 - RNA, 22 nt, synthetic construct
  source 1..22: mol_type = other RNA
tacagagggtcttggaggggac

SEQ ID NO: 14770 - RNA, 22 nt, synthetic construct
  source 1..22: mol_type = other RNA
ctacagagggtcttggagggga

SEQ ID NO: 14771 - RNA, 22 nt, synthetic construct
  source 1..22: mol_type = other RNA
tctacagagggtcttggagggg

SEQ ID NO: 14772 - RNA, 22 nt, synthetic construct
  source 1..22: mol_type = other RNA
aggtgtacagtagggtcttttt

SEQ ID NO: 14773 - RNA, 22 nt, synthetic construct
  source 1..22: mol_type = other RNA
tgtcctgtcctgcaatggaatt

SEQ ID NO: 14774 - RNA, 22 nt, synthetic construct
  source 1..22: mol_type = other RNA
aattatgtcctgtcctgcaatg

SEQ ID NO: 14775 - RNA, 22 nt, synthetic construct
  source 1..22: mol_type = other RNA
ccacccttggcttggaggccct

SEQ ID NO: 14776 - RNA, 22 nt, synthetic construct
  source 1..22: mol_type = other RNA
gccacccttggcttggaggccc

SEQ ID NO: 14777 - RNA, 22 nt, synthetic construct
  source 1..22: mol_type = other RNA
gatttgccacccttggcttgga

SEQ ID NO: 14778 - RNA, 22 nt, synthetic construct
  source 1..22: mol_type = other RNA
ggatttgccacccttggcttgg

SEQ ID NO: 14779 - RNA, 22 nt, synthetic construct
  source 1..22: mol_type = other RNA
gtatttggatttgccacccttg

SEQ ID NO: 14780 - RNA, 22 nt, synthetic construct
  source 1..22: mol_type = other RNA
tggcccctttggtatttggatt

SEQ ID NO: 14781 - RNA, 22 nt, synthetic construct
  source 1..22: mol_type = other RNA
catcattatggcccctttggta

SEQ ID NO: 14782 - RNA, 22 nt, synthetic construct
  source 1..22: mol_type = other RNA
acatcattatggcccctttggt

SEQ ID NO: 14783 - RNA, 22 nt, synthetic construct
  source 1..22: mol_type = other RNA
tacatcattatggcccctttgg

SEQ ID NO: 14784 - RNA, 22 nt, synthetic construct
  source 1..22: mol_type = other RNA
ccttctgcctggacacatttta

SEQ ID NO: 14785 - RNA, 22 nt, synthetic construct
  source 1..22: mol_type = other RNA
ccagaggccccactactcccta

SEQ ID NO: 14786 - RNA, 22 nt, synthetic construct
  source 1..22: mol_type = other RNA
ttaccagaggccccactactcc

SEQ ID NO: 14787 - RNA, 22 nt, synthetic construct
  source 1..22: mol_type = other RNA
ccaagccaatataagtgtgtgt

SEQ ID NO: 14788 - RNA, 22 nt, synthetic construct
  source 1..22: mol_type = other RNA
cccaagccaatataagtgtgtg

SEQ ID NO: 14789 - RNA, 22 nt, synthetic construct
  source 1..22: mol_type = other RNA
tttcccaagccaatataagtgt

SEQ ID NO: 14790 - RNA, 22 nt, synthetic construct
  source 1..22: mol_type = other RNA
gtttcccaagccaatataagtg

SEQ ID NO: 14791 - RNA, 22 nt, synthetic construct
  source 1..22: mol_type = other RNA
tgtttcccaagccaatataagt

SEQ ID NO: 14792 - RNA, 22 nt, synthetic construct
  source 1..22: mol_type = other RNA
ttttgtttcccaagccaatata

SEQ ID NO: 14793 - RNA, 22 nt, synthetic construct
  source 1..22: mol_type = other RNA
gttttgtttcccaagccaatat

SEQ ID NO: 14794 - RNA, 22 nt, synthetic construct
  source 1..22: mol_type = other RNA
aatccagtcgataggcctattt

SEQ ID NO: 14795 - RNA, 22 nt, synthetic construct
  source 1..22: mol_type = other RNA
tgacctgcaagctcctcagctg

SEQ ID NO: 14796 - RNA, 22 nt, synthetic construct
  source 1..22: mol_type = other RNA
gctctaaatcccctttctgacc

SEQ ID NO: 14797 - RNA, 22 nt, synthetic construct
  source 1..22: mol_type = other RNA
gttggctctaaatcccctttct

SEQ ID NO: 14798 - RNA, 22 nt, synthetic construct
  source 1..22: mol_type = other RNA
ctattggttggctctaaatccc

SEQ ID NO: 14799 - RNA, 22 nt, synthetic construct
  source 1..22: mol_type = other RNA
tcctcaaggcagggagactaga

SEQ ID NO: 14800 - RNA, 22 nt, synthetic construct
  source 1..22: mol_type = other RNA
gtcctcaaggcagggagactag

SEQ ID NO: 14801 - RNA, 22 nt, synthetic construct
  source 1..22: mol_type = other RNA
caggatctgatcatttgtcctc

SEQ ID NO: 14802 - RNA, 22 nt, synthetic construct
  source 1..22: mol_type = other RNA
acttcctggagtggcacgagga

SEQ ID NO: 14803 - RNA, 22 nt, synthetic construct
  source 1..22: mol_type = other RNA
caaaccaagtgtagatatccca

SEQ ID NO: 14804 - RNA, 22 nt, synthetic construct
  source 1..22: mol_type = other RNA
gcaaaccaagtgtagatatccc

SEQ ID NO: 14805 - RNA, 22 nt, synthetic construct
  source 1..22: mol_type = other RNA
tgcccaagagcccagggtcctg

SEQ ID NO: 14806 - RNA, 22 nt, synthetic construct
  source 1..22: mol_type = other RNA
gtgcccaagagcccagggtcct

SEQ ID NO: 14807 - RNA, 22 nt, synthetic construct
  source 1..22: mol_type = other RNA
acaaagaaacaaacctctgctc

SEQ ID NO: 14808 - RNA, 22 nt, synthetic construct
  source 1..22: mol_type = other RNA
gtacctctatggctcaccaaca

SEQ ID NO: 14809 - RNA, 22 nt, synthetic construct
  source 1..22: mol_type = other RNA
atggggtgaggttggtacctct

SEQ ID NO: 14810 - RNA, 22 nt, synthetic construct
  source 1..22: mol_type = other RNA
aaaagaaaagaaacaaaggagg

SEQ ID NO: 14811 - RNA, 22 nt, synthetic construct
  source 1..22: mol_type = other RNA
aaggcccaggggttgaaaagaa

SEQ ID NO: 14812 - RNA, 22 nt, synthetic construct
  source 1..22: mol_type = other RNA
aaaggcccaggggttgaaaaga

SEQ ID NO: 14813 - RNA, 22 nt, synthetic construct
  source 1..22: mol_type = other RNA
atcgaaggtttaaaggcccagg

SEQ ID NO: 14814 - RNA, 22 nt, synthetic construct
  source 1..22: mol_type = other RNA
atgaagagaaaaccctcatgtg

SEQ ID NO: 14815 - RNA, 22 nt, synthetic construct
  source 1..22: mol_type = other RNA
gaatgggcacccagtatgggaa

SEQ ID NO: 14816 - RNA, 22 nt, synthetic construct
  source 1..22: mol_type = other RNA
taagagcacatacaaacagaaa

SEQ ID NO: 14817 - RNA, 22 nt, synthetic construct
  source 1..22: mol_type = other RNA
ataagagcacatacaaacagaa

SEQ ID NO: 14818 - RNA, 22 nt, synthetic construct
  source 1..22: mol_type = other RNA
tataagagcacatacaaacaga

SEQ ID NO: 14819 - RNA, 22 nt, synthetic construct
  source 1..22: mol_type = other RNA
agaccagcctggccaaggtggt

SEQ ID NO: 14820 - RNA, 22 nt, synthetic construct
  source 1..22: mol_type = other RNA
gagaccagcctggccaaggtgg

SEQ ID NO: 14821 - RNA, 22 nt, synthetic construct
  source 1..22: mol_type = other RNA
ggaggccgaggcgggtggatca

SEQ ID NO: 14822 - RNA, 22 nt, synthetic construct
  source 1..22: mol_type = other RNA
cagcactttgggaggccgaggc

SEQ ID NO: 14823 - RNA, 22 nt, synthetic construct
  source 1..22: mol_type = other RNA
gaagcaaagatcaaatgcatca

SEQ ID NO: 14824 - RNA, 22 nt, synthetic construct
  source 1..22: mol_type = other RNA
gaggtcacctaggtgtccatca

SEQ ID NO: 14825 - RNA, 22 nt, synthetic construct
  source 1..22: mol_type = other RNA
tggtgacagagagttggaggtc

SEQ ID NO: 14826 - RNA, 22 nt, synthetic construct
  source 1..22: mol_type = other RNA
gtggtgacagagagttggaggt

SEQ ID NO: 14827 - RNA, 22 nt, synthetic construct
  source 1..22: mol_type = other RNA
tttgtggtgacagagagttgga

SEQ ID NO: 14828 - RNA, 22 nt, synthetic construct
  source 1..22: mol_type = other RNA
ctgctgtgttatttgtggtgac

SEQ ID NO: 14829 - RNA, 22 nt, synthetic construct
  source 1..22: mol_type = other RNA
ccacaactccccaggagaaccc

SEQ ID NO: 14830 - RNA, 22 nt, synthetic construct
  source 1..22: mol_type = other RNA
agctcttgggtctatatatcct

SEQ ID NO: 14831 - RNA, 22 nt, synthetic construct
  source 1..22: mol_type = other RNA
tgggaatgtagatggatggggc

SEQ ID NO: 14832 - RNA, 22 nt, synthetic construct
  source 1..22: mol_type = other RNA
gtgggaatgtagatggatgggg

SEQ ID NO: 14833 - RNA, 22 nt, synthetic construct
  source 1..22: mol_type = other RNA
cacgggtttgtgggaatgtaga

SEQ ID NO: 14834 - RNA, 22 nt, synthetic construct
  source 1..22: mol_type = other RNA
gttacacgggtttgtgggaatg

SEQ ID NO: 14835 - RNA, 22 nt, synthetic construct
  source 1..22: mol_type = other RNA
gacatctgggaaatgccaagtg

SEQ ID NO: 14836 - RNA, 22 nt, synthetic construct
  source 1..22: mol_type = other RNA
tgacttacctaaagtgacttag

SEQ ID NO: 14837 - RNA, 22 nt, synthetic construct
  source 1..22: mol_type = other RNA
ttgtgacttacctaaagtgact

SEQ ID NO: 14838 - RNA, 22 nt, synthetic construct
  source 1..22: mol_type = other RNA
gcacagtgcttatgtcactggg

SEQ ID NO: 14839 - RNA, 22 nt, synthetic construct
  source 1..22: mol_type = other RNA
ttggcacagtgcttatgtcact

SEQ ID NO: 14840 - RNA, 22 nt, synthetic construct
  source 1..22: mol_type = other RNA
gttggcacagtgcttatgtcac

SEQ ID NO: 14841 - RNA, 22 nt, synthetic construct
  source 1..22: mol_type = other RNA
tgttggcacagtgcttatgtca

SEQ ID NO: 14842 - RNA, 22 nt, synthetic construct
  source 1..22: mol_type = other RNA
ctcaacctctctgagtcacaga

SEQ ID NO: 14843 - RNA, 22 nt, synthetic construct
  source 1..22: mol_type = other RNA
caaatgttactcaacctctctg

SEQ ID NO: 14844 - RNA, 22 nt, synthetic construct
  source 1..22: mol_type = other RNA
cacacttgctgtgtgactttgc

SEQ ID NO: 14845 - RNA, 22 nt, synthetic construct
  source 1..22: mol_type = other RNA
aaatcttagttccacacttgct

SEQ ID NO: 14846 - RNA, 22 nt, synthetic construct
  source 1..22: mol_type = other RNA
agggtgcaggctctgggttcaa

SEQ ID NO: 14847 - RNA, 22 nt, synthetic construct
  source 1..22: mol_type = other RNA
ggagagagacaaaacataataa

SEQ ID NO: 14848 - RNA, 22 nt, synthetic construct
  source 1..22: mol_type = other RNA
aggagagagacaaaacataata

SEQ ID NO: 14849 - RNA, 22 nt, synthetic construct
  source 1..22: mol_type = other RNA
taggagagagacaaaacataat

SEQ ID NO: 14850 - RNA, 22 nt, synthetic construct
  source 1..22: mol_type = other RNA
ccacacagtccctgccaaagag

SEQ ID NO: 14851 - RNA, 22 nt, synthetic construct
  source 1..22: mol_type = other RNA
accacacagtccctgccaaaga

SEQ ID NO: 14852 - RNA, 22 nt, synthetic construct
  source 1..22: mol_type = other RNA
cttactggccccaaagaggttt

SEQ ID NO: 14853 - RNA, 22 nt, synthetic construct
  source 1..22: mol_type = other RNA
actgagcaccccgtaagaaagt

SEQ ID NO: 14854 - RNA, 22 nt, synthetic construct
  source 1..22: mol_type = other RNA
ccctctaaagctgtaaaacaat

SEQ ID NO: 14855 - RNA, 22 nt, synthetic construct
  source 1..22: mol_type = other RNA
cccctctaaagctgtaaaacaa

SEQ ID NO: 14856 - RNA, 22 nt, synthetic construct
  source 1..22: mol_type = other RNA
ctcatgcaccctgtagtcctcc

SEQ ID NO: 14857 - RNA, 22 nt, synthetic construct
  source 1..22: mol_type = other RNA
gctcatgcaccctgtagtcctc

SEQ ID NO: 14858 - RNA, 22 nt, synthetic construct
  source 1..22: mol_type = other RNA
cgcttttgctcatgcaccctgt

SEQ ID NO: 14859 - RNA, 22 nt, synthetic construct
  source 1..22: mol_type = other RNA
tgggggtagtagctcaaatgag

SEQ ID NO: 14860 - RNA, 22 nt, synthetic construct
  source 1..22: mol_type = other RNA
ggaagccaggggcctaggaatg

SEQ ID NO: 14861 - RNA, 22 nt, synthetic construct
  source 1..22: mol_type = other RNA
ccccaaggccccccccaacacc

SEQ ID NO: 14862 - RNA, 22 nt, synthetic construct
  source 1..22: mol_type = other RNA
ctttcccccaaggcccccccca

SEQ ID NO: 14863 - RNA, 22 nt, synthetic construct
  source 1..22: mol_type = other RNA
cctttcccccaaggcccccccc

SEQ ID NO: 14864 - RNA, 22 nt, synthetic construct
  source 1..22: mol_type = other RNA
cctggcagtcttctccttttcc

SEQ ID NO: 14865 - RNA, 22 nt, synthetic construct
  source 1..22: mol_type = other RNA
ctcgttgcctggcagtcttctc

SEQ ID NO: 14866 - RNA, 22 nt, synthetic construct
  source 1..22: mol_type = other RNA
tgattcctcgttgcctggcagt

SEQ ID NO: 14867 - RNA, 22 nt, synthetic construct
  source 1..22: mol_type = other RNA
agattctgattcctcgttgcct

SEQ ID NO: 14868 - RNA, 22 nt, synthetic construct
  source 1..22: mol_type = other RNA
gagattctgattcctcgttgcc

SEQ ID NO: 14869 - RNA, 22 nt, synthetic construct
  source 1..22: mol_type = other RNA
tgagattctgattcctcgttgc

SEQ ID NO: 14870 - RNA, 22 nt, synthetic construct
  source 1..22: mol_type = other RNA
agtctttttgagattctgattc

SEQ ID NO: 14871 - RNA, 22 nt, synthetic construct
  source 1..22: mol_type = other RNA
gagccccttcaattgagtcttt

SEQ ID NO: 14872 - RNA, 22 nt, synthetic construct
  source 1..22: mol_type = other RNA
aacgagtgttggagccccttca

SEQ ID NO: 14873 - RNA, 22 nt, synthetic construct
  source 1..22: mol_type = other RNA
caacgagtgttggagccccttc

SEQ ID NO: 14874 - RNA, 22 nt, synthetic construct
  source 1..22: mol_type = other RNA
ccttagccctctgagcctccgt

SEQ ID NO: 14875 - RNA, 22 nt, synthetic construct
  source 1..22: mol_type = other RNA
atcctgagtacattaccttagc

SEQ ID NO: 14876 - RNA, 22 nt, synthetic construct
  source 1..22: mol_type = other RNA
tgctctgcctttgatcctgagt

SEQ ID NO: 14877 - RNA, 22 nt, synthetic construct
  source 1..22: mol_type = other RNA
ctgctctgcctttgatcctgag

SEQ ID NO: 14878 - RNA, 22 nt, synthetic construct
  source 1..22: mol_type = other RNA
agtttctgctctgcctttgatc

SEQ ID NO: 14879 - RNA, 22 nt, synthetic construct
  source 1..22: mol_type = other RNA
gagtttctgctctgcctttgat

SEQ ID NO: 14880 - RNA, 22 nt, synthetic construct
  source 1..22: mol_type = other RNA
cagtgagccgagatcacgccac

SEQ ID NO: 14881 - RNA, 22 nt, synthetic construct
  source 1..22: mol_type = other RNA
cttgaacctgggaggcggaggt

SEQ ID NO: 14882 - RNA, 22 nt, synthetic construct
  source 1..22: mol_type = other RNA
aagaccagcctgaccagcatgg

SEQ ID NO: 14883 - RNA, 22 nt, synthetic construct
  source 1..22: mol_type = other RNA
cttgaggtcaggagttcaagac

SEQ ID NO: 14884 - RNA, 22 nt, synthetic construct
  source 1..22: mol_type = other RNA
agaggccgaggctggcggatta

SEQ ID NO: 14885 - RNA, 22 nt, synthetic construct
  source 1..22: mol_type = other RNA
aagagcatgagaaggaggccag

SEQ ID NO: 14886 - RNA, 22 nt, synthetic construct
  source 1..22: mol_type = other RNA
ctacccctaaaagcctccagca

SEQ ID NO: 14887 - RNA, 22 nt, synthetic construct
  source 1..22: mol_type = other RNA
gctacccctaaaagcctccagc

SEQ ID NO: 14888 - RNA, 22 nt, synthetic construct
  source 1..22: mol_type = other RNA
agggtctaaggaggcactgaaa

SEQ ID NO: 14889 - RNA, 22 nt, synthetic construct
  source 1..22: mol_type = other RNA
ttcccagaggcggggagtctat

SEQ ID NO: 14890 - RNA, 22 nt, synthetic construct
  source 1..22: mol_type = other RNA
cttcccagaggcggggagtcta

SEQ ID NO: 14891 - RNA, 22 nt, synthetic construct
  source 1..22: mol_type = other RNA
tcttcccagaggcggggagtct

SEQ ID NO: 14892 - RNA, 22 nt, synthetic construct
  source 1..22: mol_type = other RNA
gatgttttcttcccagaggcgg

SEQ ID NO: 14893 - RNA, 22 nt, synthetic construct
  source 1..22: mol_type = other RNA
attagatgttttcttcccagag

SEQ ID NO: 14894 - RNA, 22 nt, synthetic construct
  source 1..22: mol_type = other RNA
cgtccagttcattagatgtttt

SEQ ID NO: 14895 - RNA, 22 nt, synthetic construct
  source 1..22: mol_type = other RNA
cagacgcaggcgctgagattac

SEQ ID NO: 14896 - RNA, 22 nt, synthetic construct
  source 1..22: mol_type = other RNA
acagacgcaggcgctgagatta

SEQ ID NO: 14897 - RNA, 22 nt, synthetic construct
  source 1..22: mol_type = other RNA
tacagacgcaggcgctgagatt

SEQ ID NO: 14898 - RNA, 22 nt, synthetic construct
  source 1..22: mol_type = other RNA
tagccattttacagacgcaggc

SEQ ID NO: 14899 - RNA, 22 nt, synthetic construct
  source 1..22: mol_type = other RNA
ttatagccattttacagacgca

SEQ ID NO: 14900 - RNA, 22 nt, synthetic construct
  source 1..22: mol_type = other RNA
ttattatagccattttacagac

SEQ ID NO: 14901 - RNA, 22 nt, synthetic construct
  source 1..22: mol_type = other RNA
ttgttattatagccattttaca

SEQ ID NO: 14902 - RNA, 22 nt, synthetic construct
  source 1..22: mol_type = other RNA
acggcaactctgggagattgtt

SEQ ID NO: 14903 - RNA, 22 nt, synthetic construct
  source 1..22: mol_type = other RNA
aactgttaacggcaactctggg

SEQ ID NO: 14904 - RNA, 22 nt, synthetic construct
  source 1..22: mol_type = other RNA
caactgttaacggcaactctgg

SEQ ID NO: 14905 - RNA, 22 nt, synthetic construct
  source 1..22: mol_type = other RNA
tgtttcaactgttaacggcaac

SEQ ID NO: 14906 - RNA, 22 nt, synthetic construct
  source 1..22: mol_type = other RNA
ctattctgtttcaactgttaac

SEQ ID NO: 14907 - RNA, 22 nt, synthetic construct
  source 1..22: mol_type = other RNA
actattctgtttcaactgttaa

SEQ ID NO: 14908 - RNA, 22 nt, synthetic construct
  source 1..22: mol_type = other RNA
tctgtgtctggggctgtgctag

SEQ ID NO: 14909 - RNA, 22 nt, synthetic construct
  source 1..22: mol_type = other RNA
ctctgtgtctggggctgtgcta

SEQ ID NO: 14910 - RNA, 22 nt, synthetic construct
  source 1..22: mol_type = other RNA
atgtgcttcttacctctgtgag

SEQ ID NO: 14911 - RNA, 22 nt, synthetic construct
  source 1..22: mol_type = other RNA
ttaatgtgcttcttacctctgt

SEQ ID NO: 14912 - RNA, 22 nt, synthetic construct
  source 1..22: mol_type = other RNA
ttattaatgtgcttcttacctc

SEQ ID NO: 14913 - RNA, 22 nt, synthetic construct
  source 1..22: mol_type = other RNA
attattaatgtgcttcttacct

SEQ ID NO: 14914 - RNA, 22 nt, synthetic construct
  source 1..22: mol_type = other RNA
tattattaatgtgcttcttacc

SEQ ID NO: 14915 - RNA, 22 nt, synthetic construct
  source 1..22: mol_type = other RNA
ttattattaatgtgcttcttac

SEQ ID NO: 14916 - RNA, 22 nt, synthetic construct
  source 1..22: mol_type = other RNA
catggagcccttagaaagggga

SEQ ID NO: 14917 - RNA, 22 nt, synthetic construct
  source 1..22: mol_type = other RNA
agttgcatggagcccttagaaa

SEQ ID NO: 14918 - RNA, 22 nt, synthetic construct
  source 1..22: mol_type = other RNA
ggggagttaagttgcatggagc

SEQ ID NO: 14919 - RNA, 22 nt, synthetic construct
  source 1..22: mol_type = other RNA
gcaactcataggattaggggag

SEQ ID NO: 14920 - RNA, 22 nt, synthetic construct
  source 1..22: mol_type = other RNA
cttatctgtaaagtgggggata

SEQ ID NO: 14921 - RNA, 22 nt, synthetic construct
  source 1..22: mol_type = other RNA
ccttatctgtaaagtgggggat

SEQ ID NO: 14922 - RNA, 22 nt, synthetic construct
  source 1..22: mol_type = other RNA
aaccacttggagcctcagtttc

SEQ ID NO: 14923 - RNA, 22 nt, synthetic construct
  source 1..22: mol_type = other RNA
aaaccacttggagcctcagttt

SEQ ID NO: 14924 - RNA, 22 nt, synthetic construct
  source 1..22: mol_type = other RNA
taaaccacttggagcctcagtt

SEQ ID NO: 14925 - RNA, 22 nt, synthetic construct
  source 1..22: mol_type = other RNA
ttaaaccacttggagcctcagt

SEQ ID NO: 14926 - RNA, 22 nt, synthetic construct
  source 1..22: mol_type = other RNA
tttaaaccacttggagcctcag

SEQ ID NO: 14927 - RNA, 22 nt, synthetic construct
  source 1..22: mol_type = other RNA
attttttaaaccacttggagcc

SEQ ID NO: 14928 - RNA, 22 nt, synthetic construct
  source 1..22: mol_type = other RNA
tccctacctaccaacgcactac

SEQ ID NO: 14929 - RNA, 22 nt, synthetic construct
  source 1..22: mol_type = other RNA
aggttatccctacctaccaacg

SEQ ID NO: 14930 - RNA, 22 nt, synthetic construct
  source 1..22: mol_type = other RNA
ccaactttcaggttatccctac

SEQ ID NO: 14931 - RNA, 22 nt, synthetic construct
  source 1..22: mol_type = other RNA
cccaactttcaggttatcccta

SEQ ID NO: 14932 - RNA, 22 nt, synthetic construct
  source 1..22: mol_type = other RNA
gggtgaaatttcccaactttca

SEQ ID NO: 14933 - RNA, 22 nt, synthetic construct
  source 1..22: mol_type = other RNA
catctcagctggtgggagatga

SEQ ID NO: 14934 - RNA, 22 nt, synthetic construct
  source 1..22: mol_type = other RNA
taactcagacttaaactatctg

SEQ ID NO: 14935 - RNA, 22 nt, synthetic construct
  source 1..22: mol_type = other RNA
acctctctctcccccgagggaa

SEQ ID NO: 14936 - RNA, 22 nt, synthetic construct
  source 1..22: mol_type = other RNA
aaaggctaagtgtagacactaa

SEQ ID NO: 14937 - RNA, 22 nt, synthetic construct
  source 1..22: mol_type = other RNA
gaaaggctaagtgtagacacta

SEQ ID NO: 14938 - RNA, 22 nt, synthetic construct
  source 1..22: mol_type = other RNA
atccccacttcacactgcatgc

SEQ ID NO: 14939 - RNA, 22 nt, synthetic construct
  source 1..22: mol_type = other RNA
catccccacttcacactgcatg

SEQ ID NO: 14940 - RNA, 22 nt, synthetic construct
  source 1..22: mol_type = other RNA
tcatccccacttcacactgcat

SEQ ID NO: 14941 - RNA, 22 nt, synthetic construct
  source 1..22: mol_type = other RNA
ttttcatccccacttcacactg

SEQ ID NO: 14942 - RNA, 22 nt, synthetic construct
  source 1..22: mol_type = other RNA
attttcatccccacttcacact

SEQ ID NO: 14943 - RNA, 22 nt, synthetic construct
  source 1..22: mol_type = other RNA
gggtttattttcatccccactt

SEQ ID NO: 14944 - RNA, 22 nt, synthetic construct
  source 1..22: mol_type = other RNA
ggggtttattttcatccccact

SEQ ID NO: 14945 - RNA, 22 nt, synthetic construct
  source 1..22: mol_type = other RNA
tggggtttattttcatccccac

SEQ ID NO: 14946 - RNA, 22 nt, synthetic construct
  source 1..22: mol_type = other RNA
ccatcaaaagtcctttttgggg

SEQ ID NO: 14947 - RNA, 22 nt, synthetic construct
  source 1..22: mol_type = other RNA
gccatcaaaagtcctttttggg

SEQ ID NO: 14948 - RNA, 22 nt, synthetic construct
  source 1..22: mol_type = other RNA
tgccatcaaaagtcctttttgg

SEQ ID NO: 14949 - RNA, 22 nt, synthetic construct
  source 1..22: mol_type = other RNA
ctgatctttttgccatcaaaag

SEQ ID NO: 14950 - RNA, 22 nt, synthetic construct
  source 1..22: mol_type = other RNA
aaactgtgcttccccctgggcc

SEQ ID NO: 14951 - RNA, 22 nt, synthetic construct
  source 1..22: mol_type = other RNA
gaaggtcctctttgaaactgtg

SEQ ID NO: 14952 - RNA, 22 nt, synthetic construct
  source 1..22: mol_type = other RNA
agaaggtcctctttgaaactgt

SEQ ID NO: 14953 - RNA, 22 nt, synthetic construct
  source 1..22: mol_type = other RNA
tagaaggtcctctttgaaactg

SEQ ID NO: 14954 - RNA, 22 nt, synthetic construct
  source 1..22: mol_type = other RNA
ttagaaggtcctctttgaaact

SEQ ID NO: 14955 - RNA, 22 nt, synthetic construct
  source 1..22: mol_type = other RNA
gtaaatgggcagtatttttaga

SEQ ID NO: 14956 - RNA, 22 nt, synthetic construct
  source 1..22: mol_type = other RNA
ggtaaatgggcagtatttttag

SEQ ID NO: 14957 - RNA, 22 nt, synthetic construct
  source 1..22: mol_type = other RNA
tggtaaatgggcagtattttta

SEQ ID NO: 14958 - RNA, 22 nt, synthetic construct
  source 1..22: mol_type = other RNA
aggagccatgtgggggcagggc

SEQ ID NO: 14959 - RNA, 22 nt, synthetic construct
  source 1..22: mol_type = other RNA
gaggagccatgtgggggcaggg

SEQ ID NO: 14960 - RNA, 22 nt, synthetic construct
  source 1..22: mol_type = other RNA
tccttttgaggagccatgtggg

SEQ ID NO: 14961 - RNA, 22 nt, synthetic construct
  source 1..22: mol_type = other RNA
ctccttttgaggagccatgtgg

SEQ ID NO: 14962 - RNA, 22 nt, synthetic construct
  source 1..22: mol_type = other RNA
gccccccagcaccccggcgagg

SEQ ID NO: 14963 - RNA, 22 nt, synthetic construct
  source 1..22: mol_type = other RNA
ctgttggccccccagcaccccg

SEQ ID NO: 14964 - RNA, 22 nt, synthetic construct
  source 1..22: mol_type = other RNA
aattgctgttggccccccagca

SEQ ID NO: 14965 - RNA, 22 nt, synthetic construct
  source 1..22: mol_type = other RNA
gaattgctgttggccccccagc

SEQ ID NO: 14966 - RNA, 22 nt, synthetic construct
  source 1..22: mol_type = other RNA
tgaattgctgttggccccccag

SEQ ID NO: 14967 - RNA, 22 nt, synthetic construct
  source 1..22: mol_type = other RNA
aaccaaactacccatctccaaa

SEQ ID NO: 14968 - RNA, 22 nt, synthetic construct
  source 1..22: mol_type = other RNA
gaaccaaactacccatctccaa

SEQ ID NO: 14969 - RNA, 22 nt, synthetic construct
  source 1..22: mol_type = other RNA
gtgggctgagatttgaaccaaa

SEQ ID NO: 14970 - RNA, 22 nt, synthetic construct
  source 1..22: mol_type = other RNA
agatgaagagacaggctcagag

SEQ ID NO: 14971 - RNA, 22 nt, synthetic construct
  source 1..22: mol_type = other RNA
cagatgaagagacaggctcaga

SEQ ID NO: 14972 - RNA, 22 nt, synthetic construct
  source 1..22: mol_type = other RNA
tcagatgaagagacaggctcag

SEQ ID NO: 14973 - RNA, 22 nt, synthetic construct
  source 1..22: mol_type = other RNA
ttcagatgaagagacaggctca

SEQ ID NO: 14974 - RNA, 22 nt, synthetic construct
  source 1..22: mol_type = other RNA
ctgtttttcagatgaagagaca

SEQ ID NO: 14975 - RNA, 22 nt, synthetic construct
  source 1..22: mol_type = other RNA
tattcctgtttttcagatgaag

SEQ ID NO: 14976 - RNA, 22 nt, synthetic construct
  source 1..22: mol_type = other RNA
gtattcctgtttttcagatgaa

SEQ ID NO: 14977 - RNA, 22 nt, synthetic construct
  source 1..22: mol_type = other RNA
gtctaacttacacatcagctat

SEQ ID NO: 14978 - RNA, 22 nt, synthetic construct
  source 1..22: mol_type = other RNA
ggtctaacttacacatcagcta

SEQ ID NO: 14979 - RNA, 22 nt, synthetic construct
  source 1..22: mol_type = other RNA
ccccatttggtctaacttacac

SEQ ID NO: 14980 - RNA, 22 nt, synthetic construct
  source 1..22: mol_type = other RNA
acagtgtccagcaagtgccagg

SEQ ID NO: 14981 - RNA, 22 nt, synthetic construct
  source 1..22: mol_type = other RNA
tgcgcatggcagcctctcttca

SEQ ID NO: 14982 - RNA, 22 nt, synthetic construct
  source 1..22: mol_type = other RNA
ctgcgcatggcagcctctcttc

SEQ ID NO: 14983 - RNA, 22 nt, synthetic construct
  source 1..22: mol_type = other RNA
ccagagcgggatggagggaaaa

SEQ ID NO: 14984 - RNA, 22 nt, synthetic construct
  source 1..22: mol_type = other RNA
tccaaaccacattgccagagcg

SEQ ID NO: 14985 - RNA, 22 nt, synthetic construct
  source 1..22: mol_type = other RNA
ctccaaaccacattgccagagc

SEQ ID NO: 14986 - RNA, 22 nt, synthetic construct
  source 1..22: mol_type = other RNA
gactgtttctccaaaccacatt

SEQ ID NO: 14987 - RNA, 22 nt, synthetic construct
  source 1..22: mol_type = other RNA
ctatgtctatagatgcttagga

SEQ ID NO: 14988 - RNA, 22 nt, synthetic construct
  source 1..22: mol_type = other RNA
cctatgtctatagatgcttagg

SEQ ID NO: 14989 - RNA, 22 nt, synthetic construct
  source 1..22: mol_type = other RNA
cccacaacgccacagctgcctc

SEQ ID NO: 14990 - RNA, 22 nt, synthetic construct
  source 1..22: mol_type = other RNA
ccccacaacgccacagctgcct

SEQ ID NO: 14991 - RNA, 22 nt, synthetic construct
  source 1..22: mol_type = other RNA
aggcccaagactctaggtttcc

SEQ ID NO: 14992 - RNA, 22 nt, synthetic construct
  source 1..22: mol_type = other RNA
gagggtgtcaaagctgaaattc

SEQ ID NO: 14993 - RNA, 22 nt, synthetic construct
  source 1..22: mol_type = other RNA
cattagagggtgtcaaagctga

SEQ ID NO: 14994 - RNA, 22 nt, synthetic construct
  source 1..22: mol_type = other RNA
tgtgtggggtgccagctatgtg

SEQ ID NO: 14995 - RNA, 22 nt, synthetic construct
  source 1..22: mol_type = other RNA
tcctgcaggatcatcagaaggc

SEQ ID NO: 14996 - RNA, 22 nt, synthetic construct
  source 1..22: mol_type = other RNA
gccaggcatggtggcgtgcttc

SEQ ID NO: 14997 - RNA, 22 nt, synthetic construct
  source 1..22: mol_type = other RNA
agaccagcccgggcaacatggt

SEQ ID NO: 14998 - RNA, 22 nt, synthetic construct
  source 1..22: mol_type = other RNA
gagaccagcccgggcaacatgg

SEQ ID NO: 14999 - RNA, 22 nt, synthetic construct
  source 1..22: mol_type = other RNA
ccttgcagcccaccactgtggg

SEQ ID NO: 15000 - RNA, 22 nt, synthetic construct
  source 1..22: mol_type = other RNA
tggagaatgaagattgccttgc

SEQ ID NO: 15001 - RNA, 22 nt, synthetic construct
  source 1..22: mol_type = other RNA
gttctggagaatgaagattgcc

SEQ ID NO: 15002 - RNA, 22 nt, synthetic construct
  source 1..22: mol_type = other RNA
ccaatattagttctggagaatg

SEQ ID NO: 15003 - RNA, 22 nt, synthetic construct
  source 1..22: mol_type = other RNA
cccaatattagttctggagaat

SEQ ID NO: 15004 - RNA, 22 nt, synthetic construct
  source 1..22: mol_type = other RNA
tcccaatattagttctggagaa

SEQ ID NO: 15005 - RNA, 22 nt, synthetic construct
  source 1..22: mol_type = other RNA
tggctgtgatgccttagccaag

SEQ ID NO: 15006 - RNA, 22 nt, synthetic construct
  source 1..22: mol_type = other RNA
ggagcttgcatctgaattctgg

SEQ ID NO: 15007 - RNA, 22 nt, synthetic construct
  source 1..22: mol_type = other RNA
aggagcttgcatctgaattctg

SEQ ID NO: 15008 - RNA, 22 nt, synthetic construct
  source 1..22: mol_type = other RNA
acacgcctcagtgaaatggctt

SEQ ID NO: 15009 - RNA, 22 nt, synthetic construct
  source 1..22: mol_type = other RNA
agcttagaggaggttcacacgc

SEQ ID NO: 15010 - RNA, 22 nt, synthetic construct
  source 1..22: mol_type = other RNA
gagcttagaggaggttcacacg

SEQ ID NO: 15011 - RNA, 22 nt, synthetic construct
  source 1..22: mol_type = other RNA
tgcccatttgagcttagaggag

SEQ ID NO: 15012 - RNA, 22 nt, synthetic construct
  source 1..22: mol_type = other RNA
ccaaaaagctctggggaaaagg

SEQ ID NO: 15013 - RNA, 22 nt, synthetic construct
  source 1..22: mol_type = other RNA
cagctcacagtggacttctgcc

SEQ ID NO: 15014 - RNA, 22 nt, synthetic construct
  source 1..22: mol_type = other RNA
gcagctcacagtggacttctgc

SEQ ID NO: 15015 - RNA, 22 nt, synthetic construct
  source 1..22: mol_type = other RNA
agcgccccacttcctgcttccc

SEQ ID NO: 15016 - RNA, 22 nt, synthetic construct
  source 1..22: mol_type = other RNA
cagcgccccacttcctgcttcc

SEQ ID NO: 15017 - RNA, 22 nt, synthetic construct
  source 1..22: mol_type = other RNA
gctcaacctggacaagaagaaa

SEQ ID NO: 15018 - RNA, 22 nt, synthetic construct
  source 1..22: mol_type = other RNA
cctgggcaaaaagtcaccagag

SEQ ID NO: 15019 - RNA, 22 nt, synthetic construct
  source 1..22: mol_type = other RNA
caccactgcactccagcctggg

SEQ ID NO: 15020 - RNA, 22 nt, synthetic construct
  source 1..22: mol_type = other RNA
agaccagcctgggcaacatggt

SEQ ID NO: 15021 - RNA, 22 nt, synthetic construct
  source 1..22: mol_type = other RNA
gagaccagcctgggcaacatgg

SEQ ID NO: 15022 - RNA, 22 nt, synthetic construct
  source 1..22: mol_type = other RNA
ggagtccaaggcaggagtatca

SEQ ID NO: 15023 - RNA, 22 nt, synthetic construct
  source 1..22: mol_type = other RNA
cagcactttgggagtccaaggc

SEQ ID NO: 15024 - RNA, 22 nt, synthetic construct
  source 1..22: mol_type = other RNA
cataaggggaccctgcagactt

SEQ ID NO: 15025 - RNA, 22 nt, synthetic construct
  source 1..22: mol_type = other RNA
gcataaggggaccctgcagact

SEQ ID NO: 15026 - RNA, 22 nt, synthetic construct
  source 1..22: mol_type = other RNA
ttttgcataaggggaccctgca

SEQ ID NO: 15027 - RNA, 22 nt, synthetic construct
  source 1..22: mol_type = other RNA
tgttcttttgcataaggggacc

SEQ ID NO: 15028 - RNA, 22 nt, synthetic construct
  source 1..22: mol_type = other RNA
tgaagccgagctttctgttctt

SEQ ID NO: 15029 - RNA, 22 nt, synthetic construct
  source 1..22: mol_type = other RNA
ttccgaggtcaaactttgtgaa

SEQ ID NO: 15030 - RNA, 22 nt, synthetic construct
  source 1..22: mol_type = other RNA
cttccgaggtcaaactttgtga

SEQ ID NO: 15031 - RNA, 22 nt, synthetic construct
  source 1..22: mol_type = other RNA
ccttccatttcttccgaggtca

SEQ ID NO: 15032 - RNA, 22 nt, synthetic construct
  source 1..22: mol_type = other RNA
tgagagtgacaaagggaccctt

SEQ ID NO: 15033 - RNA, 22 nt, synthetic construct
  source 1..22: mol_type = other RNA
gtgagagtgacaaagggaccct

SEQ ID NO: 15034 - RNA, 22 nt, synthetic construct
  source 1..22: mol_type = other RNA
cttcttacgtttgtgagagtga

SEQ ID NO: 15035 - RNA, 22 nt, synthetic construct
  source 1..22: mol_type = other RNA
gcttcttacgtttgtgagagtg

SEQ ID NO: 15036 - RNA, 22 nt, synthetic construct
  source 1..22: mol_type = other RNA
gtttgcttcttacgtttgtgag

SEQ ID NO: 15037 - RNA, 22 nt, synthetic construct
  source 1..22: mol_type = other RNA
ttagtttgcttcttacgtttgt

SEQ ID NO: 15038 - RNA, 22 nt, synthetic construct
  source 1..22: mol_type = other RNA
aggcagcacagcttctacatgg

SEQ ID NO: 15039 - RNA, 22 nt, synthetic construct
  source 1..22: mol_type = other RNA
aaggcagcacagcttctacatg

SEQ ID NO: 15040 - RNA, 22 nt, synthetic construct
  source 1..22: mol_type = other RNA
agtcacgcggagcccttagcaa

SEQ ID NO: 15041 - RNA, 22 nt, synthetic construct
  source 1..22: mol_type = other RNA
ggggagttaagtcacgcggagc

SEQ ID NO: 15042 - RNA, 22 nt, synthetic construct
  source 1..22: mol_type = other RNA
gcaactcacaaggattagggga

SEQ ID NO: 15043 - RNA, 22 nt, synthetic construct
  source 1..22: mol_type = other RNA
catatctataaaatgcgaataa

SEQ ID NO: 15044 - RNA, 22 nt, synthetic construct
  source 1..22: mol_type = other RNA
ccatatctataaaatgcgaata

SEQ ID NO: 15045 - RNA, 22 nt, synthetic construct
  source 1..22: mol_type = other RNA
aaccacttggagcctcagtttc

SEQ ID NO: 15046 - RNA, 22 nt, synthetic construct
  source 1..22: mol_type = other RNA
aaaccacttggagcctcagttt

SEQ ID NO: 15047 - RNA, 22 nt, synthetic construct
  source 1..22: mol_type = other RNA
taaaccacttggagcctcagtt

SEQ ID NO: 15048 - RNA, 22 nt, synthetic construct
  source 1..22: mol_type = other RNA
ttaaaccacttggagcctcagt

SEQ ID NO: 15049 - RNA, 22 nt, synthetic construct
  source 1..22: mol_type = other RNA
tttaaaccacttggagcctcag

SEQ ID NO: 15050 - RNA, 22 nt, synthetic construct
  source 1..22: mol_type = other RNA
attttttaaaccacttggagcc

SEQ ID NO: 15051 - RNA, 22 nt, synthetic construct
  source 1..22: mol_type = other RNA
agactacccctacctaccaaca

SEQ ID NO: 15052 - RNA, 22 nt, synthetic construct
  source 1..22: mol_type = other RNA
ccaactttgagactacccctac

SEQ ID NO: 15053 - RNA, 22 nt, synthetic construct
  source 1..22: mol_type = other RNA
accaactttgagactaccccta

SEQ ID NO: 15054 - RNA, 22 nt, synthetic construct
  source 1..22: mol_type = other RNA
gcgtaaaatttaccaactttga

SEQ ID NO: 15055 - RNA, 22 nt, synthetic construct
  source 1..22: mol_type = other RNA
agaagggaaagaaggcaagtat

SEQ ID NO: 15056 - RNA, 22 nt, synthetic construct
  source 1..22: mol_type = other RNA
agcacacagtcagagaaataaa

SEQ ID NO: 15057 - RNA, 22 nt, synthetic construct
  source 1..22: mol_type = other RNA
atgagctctgcttcaaactctg

SEQ ID NO: 15058 - RNA, 22 nt, synthetic construct
  source 1..22: mol_type = other RNA
gcccacccccacttattgatga

SEQ ID NO: 15059 - RNA, 22 nt, synthetic construct
  source 1..22: mol_type = other RNA
agcccacccccacttattgatg

SEQ ID NO: 15060 - RNA, 22 nt, synthetic construct
  source 1..22: mol_type = other RNA
ccaatgaaatgatcacccttgt

SEQ ID NO: 15061 - RNA, 22 nt, synthetic construct
  source 1..22: mol_type = other RNA
cccccagtcaaaatgttcccaa

SEQ ID NO: 15062 - RNA, 22 nt, synthetic construct
  source 1..22: mol_type = other RNA
cttcactctgcagatgacaaga

SEQ ID NO: 15063 - RNA, 22 nt, synthetic construct
  source 1..22: mol_type = other RNA
ggtctgccagggaccttcaagc

SEQ ID NO: 15064 - RNA, 22 nt, synthetic construct
  source 1..22: mol_type = other RNA
tcacagggcattgggtctgcca

SEQ ID NO: 15065 - RNA, 22 nt, synthetic construct
  source 1..22: mol_type = other RNA
ctcacagggcattgggtctgcc

SEQ ID NO: 15066 - RNA, 22 nt, synthetic construct
  source 1..22: mol_type = other RNA
tctcacagggcattgggtctgc

SEQ ID NO: 15067 - RNA, 22 nt, synthetic construct
  source 1..22: mol_type = other RNA
cccaaactcagttttctcacag

SEQ ID NO: 15068 - RNA, 22 nt, synthetic construct
  source 1..22: mol_type = other RNA
catatctataaaataataagtt

SEQ ID NO: 15069 - RNA, 22 nt, synthetic construct
  source 1..22: mol_type = other RNA
tataagataattccatatctat

SEQ ID NO: 15070 - RNA, 22 nt, synthetic construct
  source 1..22: mol_type = other RNA
ctataagataattccatatcta

SEQ ID NO: 15071 - RNA, 22 nt, synthetic construct
  source 1..22: mol_type = other RNA
catatctataacatttctataa

SEQ ID NO: 15072 - RNA, 22 nt, synthetic construct
  source 1..22: mol_type = other RNA
ggccatatctataaaatgattc

SEQ ID NO: 15073 - RNA, 22 nt, synthetic construct
  source 1..22: mol_type = other RNA
gactttgggccatatctataaa

SEQ ID NO: 15074 - RNA, 22 nt, synthetic construct
  source 1..22: mol_type = other RNA
tgtgactttggactttgggcca

SEQ ID NO: 15075 - RNA, 22 nt, synthetic construct
  source 1..22: mol_type = other RNA
aggcagtgtgatctcgtgacaa

SEQ ID NO: 15076 - RNA, 22 nt, synthetic construct
  source 1..22: mol_type = other RNA
cagcaatctgcctcctctttga

SEQ ID NO: 15077 - RNA, 22 nt, synthetic construct
  source 1..22: mol_type = other RNA
agaacctacattgcagcaatct

SEQ ID NO: 15078 - RNA, 22 nt, synthetic construct
  source 1..22: mol_type = other RNA
ttaagaacctacattgcagcaa

SEQ ID NO: 15079 - RNA, 22 nt, synthetic construct
  source 1..22: mol_type = other RNA
cacccatgctctttattaagaa

SEQ ID NO: 15080 - RNA, 22 nt, synthetic construct
  source 1..22: mol_type = other RNA
ccccagctcctgcctgatgccc

SEQ ID NO: 15081 - RNA, 22 nt, synthetic construct
  source 1..22: mol_type = other RNA
tctcagagcagtgagaaaagac

SEQ ID NO: 15082 - RNA, 22 nt, synthetic construct
  source 1..22: mol_type = other RNA
ggggtgagatgctccacctctc

SEQ ID NO: 15083 - RNA, 22 nt, synthetic construct
  source 1..22: mol_type = other RNA
ctggagcagggccaaagctggg

SEQ ID NO: 15084 - RNA, 22 nt, synthetic construct
  source 1..22: mol_type = other RNA
cctggagcagggccaaagctgg

SEQ ID NO: 15085 - RNA, 22 nt, synthetic construct
  source 1..22: mol_type = other RNA
agcgggggctgcaggaacccaa

SEQ ID NO: 15086 - RNA, 22 nt, synthetic construct
  source 1..22: mol_type = other RNA
atgacggttgagcgggggctgc

SEQ ID NO: 15087 - RNA, 22 nt, synthetic construct
  source 1..22: mol_type = other RNA
cagtccaagctggggcactggc

SEQ ID NO: 15088 - RNA, 22 nt, synthetic construct
  source 1..22: mol_type = other RNA
actgcctggggagaggctcagc

SEQ ID NO: 15089 - RNA, 22 nt, synthetic construct
  source 1..22: mol_type = other RNA
acgcatccacagctttcactgc

SEQ ID NO: 15090 - RNA, 22 nt, synthetic construct
  source 1..22: mol_type = other RNA
tttcacgcatccacagctttca

SEQ ID NO: 15091 - RNA, 22 nt, synthetic construct
  source 1..22: mol_type = other RNA
ctttcacgcatccacagctttc

SEQ ID NO: 15092 - RNA, 22 nt, synthetic construct
  source 1..22: mol_type = other RNA
tctttcacgcatccacagcttt

SEQ ID NO: 15093 - RNA, 22 nt, synthetic construct
  source 1..22: mol_type = other RNA
caggtgtgagccaccacacccg

SEQ ID NO: 15094 - RNA, 22 nt, synthetic construct
  source 1..22: mol_type = other RNA
gaactcccgacctcaggtgatc

SEQ ID NO: 15095 - RNA, 22 nt, synthetic construct
  source 1..22: mol_type = other RNA
cgaactcccgacctcaggtgat

SEQ ID NO: 15096 - RNA, 22 nt, synthetic construct
  source 1..22: mol_type = other RNA
gtcaggctggtttcgaactccc

SEQ ID NO: 15097 - RNA, 22 nt, synthetic construct
  source 1..22: mol_type = other RNA
accatgttggtcaggctggttt

SEQ ID NO: 15098 - RNA, 22 nt, synthetic construct
  source 1..22: mol_type = other RNA
caccatgttggtcaggctggtt

SEQ ID NO: 15099 - RNA, 22 nt, synthetic construct
  source 1..22: mol_type = other RNA
gtaaagatggggtttcaccatg

SEQ ID NO: 15100 - RNA, 22 nt, synthetic construct
  source 1..22: mol_type = other RNA
agtaaagatggggtttcaccat

SEQ ID NO: 15101 - RNA, 22 nt, synthetic construct
  source 1..22: mol_type = other RNA
tagtaaagatggggtttcacca

SEQ ID NO: 15102 - RNA, 22 nt, synthetic construct
  source 1..22: mol_type = other RNA
ttagtaaagatggggtttcacc

SEQ ID NO: 15103 - RNA, 22 nt, synthetic construct
  source 1..22: mol_type = other RNA
tttttagtaaagatggggtttc

SEQ ID NO: 15104 - RNA, 22 nt, synthetic construct
  source 1..22: mol_type = other RNA
atttttagtaaagatggggttt

SEQ ID NO: 15105 - RNA, 22 nt, synthetic construct
  source 1..22: mol_type = other RNA
tatttttagtaaagatggggtt

SEQ ID NO: 15106 - RNA, 22 nt, synthetic construct
  source 1..22: mol_type = other RNA
ttatttttagtaaagatggggt

SEQ ID NO: 15107 - RNA, 22 nt, synthetic construct
  source 1..22: mol_type = other RNA
tttatttttagtaaagatgggg

SEQ ID NO: 15108 - RNA, 22 nt, synthetic construct
  source 1..22: mol_type = other RNA
ttttatttttagtaaagatggg

SEQ ID NO: 15109 - RNA, 22 nt, synthetic construct
  source 1..22: mol_type = other RNA
caggcacccgccaccatgcctg

SEQ ID NO: 15110 - RNA, 22 nt, synthetic construct
  source 1..22: mol_type = other RNA
tcctgcttcaacctcccaagta

SEQ ID NO: 15111 - RNA, 22 nt, synthetic construct
  source 1..22: mol_type = other RNA
aagcaattctcctgcttcaacc

SEQ ID NO: 15112 - RNA, 22 nt, synthetic construct
  source 1..22: mol_type = other RNA
agacagagtctcactctgtcgc

SEQ ID NO: 15113 - RNA, 22 nt, synthetic construct
  source 1..22: mol_type = other RNA
gagacagagtctcactctgtcg

SEQ ID NO: 15114 - RNA, 22 nt, synthetic construct
  source 1..22: mol_type = other RNA
tgagacagagtctcactctgtc

SEQ ID NO: 15115 - RNA, 22 nt, synthetic construct
  source 1..22: mol_type = other RNA
ttgagacagagtctcactctgt

SEQ ID NO: 15116 - RNA, 22 nt, synthetic construct
  source 1..22: mol_type = other RNA
tttgagacagagtctcactctg

SEQ ID NO: 15117 - RNA, 22 nt, synthetic construct
  source 1..22: mol_type = other RNA
ttttgagacagagtctcactct

SEQ ID NO: 15118 - RNA, 22 nt, synthetic construct
  source 1..22: mol_type = other RNA
tttttgagacagagtctcactc

SEQ ID NO: 15119 - RNA, 22 nt, synthetic construct
  source 1..22: mol_type = other RNA
ttttttgagacagagtctcact

SEQ ID NO: 15120 - RNA, 22 nt, synthetic construct
  source 1..22: mol_type = other RNA
tttttttgagacagagtctcac

SEQ ID NO: 15121 - RNA, 22 nt, synthetic construct
  source 1..22: mol_type = other RNA
tttttttttttgagacagagtc

SEQ ID NO: 15122 - RNA, 22 nt, synthetic construct
  source 1..22: mol_type = other RNA
ctttttttttttgagacagagt

SEQ ID NO: 15123 - RNA, 22 nt, synthetic construct
  source 1..22: mol_type = other RNA
tctttttttttttgagacagag

SEQ ID NO: 15124 - RNA, 22 nt, synthetic construct
  source 1..22: mol_type = other RNA
tttttctttttttttttgagac

SEQ ID NO: 15125 - RNA, 22 nt, synthetic construct
  source 1..22: mol_type = other RNA
ctttttctttttttttttgaga

SEQ ID NO: 15126 - RNA, 22 nt, synthetic construct
  source 1..22: mol_type = other RNA
tctttttctttttttttttgag

SEQ ID NO: 15127 - RNA, 22 nt, synthetic construct
  source 1..22: mol_type = other RNA
ctgagactcattttctttttct

SEQ ID NO: 15128 - RNA, 22 nt, synthetic construct
  source 1..22: mol_type = other RNA
aagagtaagctcatgagaaaac

SEQ ID NO: 15129 - RNA, 22 nt, synthetic construct
  source 1..22: mol_type = other RNA
tgggcccagaagagaatacatt

SEQ ID NO: 15130 - RNA, 22 nt, synthetic construct
  source 1..22: mol_type = other RNA
aacccaccacacatgacatgca

SEQ ID NO: 15131 - RNA, 22 nt, synthetic construct
  source 1..22: mol_type = other RNA
gggggccacctttcaacccacc

SEQ ID NO: 15132 - RNA, 22 nt, synthetic construct
  source 1..22: mol_type = other RNA
ggggggccacctttcaacccac

SEQ ID NO: 15133 - RNA, 22 nt, synthetic construct
  source 1..22: mol_type = other RNA
acatggacatatcttttggggg

SEQ ID NO: 15134 - RNA, 22 nt, synthetic construct
  source 1..22: mol_type = other RNA
gacatggacatatcttttgggg

SEQ ID NO: 15135 - RNA, 22 nt, synthetic construct
  source 1..22: mol_type = other RNA
cagggatttgacatggacatat

SEQ ID NO: 15136 - RNA, 22 nt, synthetic construct
  source 1..22: mol_type = other RNA
ccaaataaagtcacactgacag

SEQ ID NO: 15137 - RNA, 22 nt, synthetic construct
  source 1..22: mol_type = other RNA
cccaaataaagtcacactgaca

SEQ ID NO: 15138 - RNA, 22 nt, synthetic construct
  source 1..22: mol_type = other RNA
tatctgcaaagacccttttccc

SEQ ID NO: 15139 - RNA, 22 nt, synthetic construct
  source 1..22: mol_type = other RNA
caggcatgagccactgcaccca

SEQ ID NO: 15140 - RNA, 22 nt, synthetic construct
  source 1..22: mol_type = other RNA
gccacgctggtcttgaactcct

SEQ ID NO: 15141 - RNA, 22 nt, synthetic construct
  source 1..22: mol_type = other RNA
ccatgttggccacgctggtctt

SEQ ID NO: 15142 - RNA, 22 nt, synthetic construct
  source 1..22: mol_type = other RNA
gccatgttggccacgctggtct

SEQ ID NO: 15143 - RNA, 22 nt, synthetic construct
  source 1..22: mol_type = other RNA
tgccatgttggccacgctggtc

SEQ ID NO: 15144 - RNA, 22 nt, synthetic construct
  source 1..22: mol_type = other RNA
gtagaaatggggttttgccatg

SEQ ID NO: 15145 - RNA, 22 nt, synthetic construct
  source 1..22: mol_type = other RNA
agtagaaatggggttttgccat

SEQ ID NO: 15146 - RNA, 22 nt, synthetic construct
  source 1..22: mol_type = other RNA
tagtagaaatggggttttgcca

SEQ ID NO: 15147 - RNA, 22 nt, synthetic construct
  source 1..22: mol_type = other RNA
ttagtagaaatggggttttgcc

SEQ ID NO: 15148 - RNA, 22 nt, synthetic construct
  source 1..22: mol_type = other RNA
tatttttagtagaaatggggtt

SEQ ID NO: 15149 - RNA, 22 nt, synthetic construct
  source 1..22: mol_type = other RNA
gtatttttagtagaaatggggt

SEQ ID NO: 15150 - RNA, 22 nt, synthetic construct
  source 1..22: mol_type = other RNA
tgtatttttagtagaaatgggg

SEQ ID NO: 15151 - RNA, 22 nt, synthetic construct
  source 1..22: mol_type = other RNA
ttgtatttttagtagaaatggg

SEQ ID NO: 15152 - RNA, 22 nt, synthetic construct
  source 1..22: mol_type = other RNA
caggtgctcaccaccatgacca

SEQ ID NO: 15153 - RNA, 22 nt, synthetic construct
  source 1..22: mol_type = other RNA
tcctgccccagtctcctgagta

SEQ ID NO: 15154 - RNA, 22 nt, synthetic construct
  source 1..22: mol_type = other RNA
aagcgattctcctgccccagtc

SEQ ID NO: 15155 - RNA, 22 nt, synthetic construct
  source 1..22: mol_type = other RNA
cccaggctggaatgcagtggcg

SEQ ID NO: 15156 - RNA, 22 nt, synthetic construct
  source 1..22: mol_type = other RNA
agacagaggcttgctctgttgc

SEQ ID NO: 15157 - RNA, 22 nt, synthetic construct
  source 1..22: mol_type = other RNA
gagacagaggcttgctctgttg

SEQ ID NO: 15158 - RNA, 22 nt, synthetic construct
  source 1..22: mol_type = other RNA
ccttcttttgagacagaggctt

SEQ ID NO: 15159 - RNA, 22 nt, synthetic construct
  source 1..22: mol_type = other RNA
gccttcttttgagacagaggct

SEQ ID NO: 15160 - RNA, 22 nt, synthetic construct
  source 1..22: mol_type = other RNA
tgccttcttttgagacagaggc

SEQ ID NO: 15161 - RNA, 22 nt, synthetic construct
  source 1..22: mol_type = other RNA
ttgccttcttttgagacagagg

SEQ ID NO: 15162 - RNA, 22 nt, synthetic construct
  source 1..22: mol_type = other RNA
tttgccttcttttgagacagag

SEQ ID NO: 15163 - RNA, 22 nt, synthetic construct
  source 1..22: mol_type = other RNA
tttttttgccttcttttgagac

SEQ ID NO: 15164 - RNA, 22 nt, synthetic construct
  source 1..22: mol_type = other RNA
attctttttttgccttcttttg

SEQ ID NO: 15165 - RNA, 22 nt, synthetic construct
  source 1..22: mol_type = other RNA
aagatctttaattctttttttg

SEQ ID NO: 15166 - RNA, 22 nt, synthetic construct
  source 1..22: mol_type = other RNA
caagatctttaattcttttttt

SEQ ID NO: 15167 - RNA, 22 nt, synthetic construct
  source 1..22: mol_type = other RNA
ggacccacctagataatccagg

SEQ ID NO: 15168 - RNA, 22 nt, synthetic construct
  source 1..22: mol_type = other RNA
aggacccacctagataatccag

SEQ ID NO: 15169 - RNA, 22 nt, synthetic construct
  source 1..22: mol_type = other RNA
gatttaggacccacctagataa

SEQ ID NO: 15170 - RNA, 22 nt, synthetic construct
  source 1..22: mol_type = other RNA
tcttataaagacacttgtcatt

SEQ ID NO: 15171 - RNA, 22 nt, synthetic construct
  source 1..22: mol_type = other RNA
gtggccacatcacctactcctc

SEQ ID NO: 15172 - RNA, 22 nt, synthetic construct
  source 1..22: mol_type = other RNA
aagccaaggtgtcagcagggcc

SEQ ID NO: 15173 - RNA, 22 nt, synthetic construct
  source 1..22: mol_type = other RNA
tggaggccagaagttgaagcca

SEQ ID NO: 15174 - RNA, 22 nt, synthetic construct
  source 1..22: mol_type = other RNA
tctcatggttctggaggccaga

SEQ ID NO: 15175 - RNA, 22 nt, synthetic construct
  source 1..22: mol_type = other RNA
ttctctcatggttctggaggcc

SEQ ID NO: 15176 - RNA, 22 nt, synthetic construct
  source 1..22: mol_type = other RNA
ccagggctgctgaaacaaggta

SEQ ID NO: 15177 - RNA, 22 nt, synthetic construct
  source 1..22: mol_type = other RNA
cccagggctgctgaaacaaggt

SEQ ID NO: 15178 - RNA, 22 nt, synthetic construct
  source 1..22: mol_type = other RNA
atttcccagggctgctgaaaca

SEQ ID NO: 15179 - RNA, 22 nt, synthetic construct
  source 1..22: mol_type = other RNA
catggtatattcatttcccagg

SEQ ID NO: 15180 - RNA, 22 nt, synthetic construct
  source 1..22: mol_type = other RNA
ccatggtatattcatttcccag

SEQ ID NO: 15181 - RNA, 22 nt, synthetic construct
  source 1..22: mol_type = other RNA
aggtccatgtttccatggtata

SEQ ID NO: 15182 - RNA, 22 nt, synthetic construct
  source 1..22: mol_type = other RNA
gcagatgaagaacttgagaccc

SEQ ID NO: 15183 - RNA, 22 nt, synthetic construct
  source 1..22: mol_type = other RNA
tctccattggcagatgaagaac

SEQ ID NO: 15184 - RNA, 22 nt, synthetic construct
  source 1..22: mol_type = other RNA
ttgtctccattggcagatgaag

SEQ ID NO: 15185 - RNA, 22 nt, synthetic construct
  source 1..22: mol_type = other RNA
aaacctaggaagtaagcattat

SEQ ID NO: 15186 - RNA, 22 nt, synthetic construct
  source 1..22: mol_type = other RNA
catctcaataaagctgttaaaa

SEQ ID NO: 15187 - RNA, 22 nt, synthetic construct
  source 1..22: mol_type = other RNA
tatatgtgaattacatctcaat

SEQ ID NO: 15188 - RNA, 22 nt, synthetic construct
  source 1..22: mol_type = other RNA
agtgggcaaattgtatatgtga

SEQ ID NO: 15189 - RNA, 22 nt, synthetic construct
  source 1..22: mol_type = other RNA
aagtgggcaaattgtatatgtg

SEQ ID NO: 15190 - RNA, 22 nt, synthetic construct
  source 1..22: mol_type = other RNA
taagtgggcaaattgtatatgt

SEQ ID NO: 15191 - RNA, 22 nt, synthetic construct
  source 1..22: mol_type = other RNA
caggcatgaactgtacttttta

SEQ ID NO: 15192 - RNA, 22 nt, synthetic construct
  source 1..22: mol_type = other RNA
ggattacaggcatgaactgtac

SEQ ID NO: 15193 - RNA, 22 nt, synthetic construct
  source 1..22: mol_type = other RNA
tcaaactcctgacctcaagtga

SEQ ID NO: 15194 - RNA, 22 nt, synthetic construct
  source 1..22: mol_type = other RNA
gccaggctgttctcaaactcct

SEQ ID NO: 15195 - RNA, 22 nt, synthetic construct
  source 1..22: mol_type = other RNA
ggccaggctgttctcaaactcc

SEQ ID NO: 15196 - RNA, 22 nt, synthetic construct
  source 1..22: mol_type = other RNA
tggccaggctgttctcaaactc

SEQ ID NO: 15197 - RNA, 22 nt, synthetic construct
  source 1..22: mol_type = other RNA
accattttggccaggctgttct

SEQ ID NO: 15198 - RNA, 22 nt, synthetic construct
  source 1..22: mol_type = other RNA
caccattttggccaggctgttc

SEQ ID NO: 15199 - RNA, 22 nt, synthetic construct
  source 1..22: mol_type = other RNA
gtagagacagtgtttcaccatt

SEQ ID NO: 15200 - RNA, 22 nt, synthetic construct
  source 1..22: mol_type = other RNA
agtagagacagtgtttcaccat

SEQ ID NO: 15201 - RNA, 22 nt, synthetic construct
  source 1..22: mol_type = other RNA
tagtagagacagtgtttcacca

SEQ ID NO: 15202 - RNA, 22 nt, synthetic construct
  source 1..22: mol_type = other RNA
ttagtagagacagtgtttcacc

SEQ ID NO: 15203 - RNA, 22 nt, synthetic construct
  source 1..22: mol_type = other RNA
catttttagtagagacagtgtt

SEQ ID NO: 15204 - RNA, 22 nt, synthetic construct
  source 1..22: mol_type = other RNA
gcatttttagtagagacagtgt

SEQ ID NO: 15205 - RNA, 22 nt, synthetic construct
  source 1..22: mol_type = other RNA
tgcatttttagtagagacagtg

SEQ ID NO: 15206 - RNA, 22 nt, synthetic construct
  source 1..22: mol_type = other RNA
ttgcatttttagtagagacagt

SEQ ID NO: 15207 - RNA, 22 nt, synthetic construct
  source 1..22: mol_type = other RNA
caggcacccaccaccacacccg

SEQ ID NO: 15208 - RNA, 22 nt, synthetic construct
  source 1..22: mol_type = other RNA
ttctgcctcagcctcctgagca

SEQ ID NO: 15209 - RNA, 22 nt, synthetic construct
  source 1..22: mol_type = other RNA
aagccattcttctgcctcagcc

SEQ ID NO: 15210 - RNA, 22 nt, synthetic construct
  source 1..22: mol_type = other RNA
agacggagtctctgtcacccag

SEQ ID NO: 15211 - RNA, 22 nt, synthetic construct
  source 1..22: mol_type = other RNA
aagacggagtctctgtcaccca

SEQ ID NO: 15212 - RNA, 22 nt, synthetic construct
  source 1..22: mol_type = other RNA
taagacggagtctctgtcaccc

SEQ ID NO: 15213 - RNA, 22 nt, synthetic construct
  source 1..22: mol_type = other RNA
ttaagacggagtctctgtcacc

SEQ ID NO: 15214 - RNA, 22 nt, synthetic construct
  source 1..22: mol_type = other RNA
tttaagacggagtctctgtcac

SEQ ID NO: 15215 - RNA, 22 nt, synthetic construct
  source 1..22: mol_type = other RNA
ttttaagacggagtctctgtca

SEQ ID NO: 15216 - RNA, 22 nt, synthetic construct
  source 1..22: mol_type = other RNA
tttttaagacggagtctctgtc

SEQ ID NO: 15217 - RNA, 22 nt, synthetic construct
  source 1..22: mol_type = other RNA
ttttttaagacggagtctctgt

SEQ ID NO: 15218 - RNA, 22 nt, synthetic construct
  source 1..22: mol_type = other RNA
tttttttaagacggagtctctg

SEQ ID NO: 15219 - RNA, 22 nt, synthetic construct
  source 1..22: mol_type = other RNA
ttttttttaagacggagtctct

SEQ ID NO: 15220 - RNA, 22 nt, synthetic construct
  source 1..22: mol_type = other RNA
tttttttttaagacggagtctc

SEQ ID NO: 15221 - RNA, 22 nt, synthetic construct
  source 1..22: mol_type = other RNA
ttttttttttaagacggagtct

SEQ ID NO: 15222 - RNA, 22 nt, synthetic construct
  source 1..22: mol_type = other RNA
tttttttttttaagacggagtc

SEQ ID NO: 15223 - RNA, 22 nt, synthetic construct
  source 1..22: mol_type = other RNA
ttttttttttttaagacggagt

SEQ ID NO: 15224 - RNA, 22 nt, synthetic construct
  source 1..22: mol_type = other RNA
tttttttttttttaagacggag

SEQ ID NO: 15225 - RNA, 22 nt, synthetic construct
  source 1..22: mol_type = other RNA
ttttttttttttttaagacgga

SEQ ID NO: 15226 - RNA, 22 nt, synthetic construct
  source 1..22: mol_type = other RNA
tttttttttttttttaagacgg

SEQ ID NO: 15227 - RNA, 22 nt, synthetic construct
  source 1..22: mol_type = other RNA
ttttttttttttttttaagacg

SEQ ID NO: 15228 - RNA, 22 nt, synthetic construct
  source 1..22: mol_type = other RNA
tttttttttttttttttaagac

SEQ ID NO: 15229 - RNA, 22 nt, synthetic construct
  source 1..22: mol_type = other RNA
ccaaaagaacactgaactctac

SEQ ID NO: 15230 - RNA, 22 nt, synthetic construct
  source 1..22: mol_type = other RNA
actgtggggatgggagatggtc

SEQ ID NO: 15231 - RNA, 22 nt, synthetic construct
  source 1..22: mol_type = other RNA
gggggtgatgaaatgtgctaaa

SEQ ID NO: 15232 - RNA, 22 nt, synthetic construct
  source 1..22: mol_type = other RNA
tttagggggtgatgaaatgtgc

SEQ ID NO: 15233 - RNA, 22 nt, synthetic construct
  source 1..22: mol_type = other RNA
ctttagggggtgatgaaatgtg

SEQ ID NO: 15234 - RNA, 22 nt, synthetic construct
  source 1..22: mol_type = other RNA
gaaggaaatggggaacaactgc

SEQ ID NO: 15235 - RNA, 22 nt, synthetic construct
  source 1..22: mol_type = other RNA
ggaaggaaatggggaacaactg

SEQ ID NO: 15236 - RNA, 22 nt, synthetic construct
  source 1..22: mol_type = other RNA
tggaaggaaatggggaacaact

SEQ ID NO: 15237 - RNA, 22 nt, synthetic construct
  source 1..22: mol_type = other RNA
cctagggcttggcagagaggga

SEQ ID NO: 15238 - RNA, 22 nt, synthetic construct
  source 1..22: mol_type = other RNA
gtggttgcctagggcttggcag

SEQ ID NO: 15239 - RNA, 22 nt, synthetic construct
  source 1..22: mol_type = other RNA
agaaagaaagcatattagtggt

SEQ ID NO: 15240 - RNA, 22 nt, synthetic construct
  source 1..22: mol_type = other RNA
aagaaagaaagcatattagtgg

SEQ ID NO: 15241 - RNA, 22 nt, synthetic construct
  source 1..22: mol_type = other RNA
taagaaagaaagcatattagtg

SEQ ID NO: 15242 - RNA, 22 nt, synthetic construct
  source 1..22: mol_type = other RNA
ttaagaaagaaagcatattagt

SEQ ID NO: 15243 - RNA, 22 nt, synthetic construct
  source 1..22: mol_type = other RNA
tttaagaaagaaagcatattag

SEQ ID NO: 15244 - RNA, 22 nt, synthetic construct
  source 1..22: mol_type = other RNA
ttttaagaaagaaagcatatta

SEQ ID NO: 15245 - RNA, 22 nt, synthetic construct
  source 1..22: mol_type = other RNA
tttttaagaaagaaagcatatt

SEQ ID NO: 15246 - RNA, 22 nt, synthetic construct
  source 1..22: mol_type = other RNA
ttttttaagaaagaaagcatat

SEQ ID NO: 15247 - RNA, 22 nt, synthetic construct
  source 1..22: mol_type = other RNA
atttttttttaagaaagaaagc

SEQ ID NO: 15248 - RNA, 22 nt, synthetic construct
  source 1..22: mol_type = other RNA
aagaccagcctgggcaacatag

SEQ ID NO: 15249 - RNA, 22 nt, synthetic construct
  source 1..22: mol_type = other RNA
ggaggctgagacaggagaatcg

SEQ ID NO: 15250 - RNA, 22 nt, synthetic construct
  source 1..22: mol_type = other RNA
aaatgaccaaaacaggcaaatc

SEQ ID NO: 15251 - RNA, 22 nt, synthetic construct
  source 1..22: mol_type = other RNA
gaaatgaccaaaacaggcaaat

SEQ ID NO: 15252 - RNA, 22 nt, synthetic construct
  source 1..22: mol_type = other RNA
tttgaaatgaccaaaacaggca

SEQ ID NO: 15253 - RNA, 22 nt, synthetic construct
  source 1..22: mol_type = other RNA
atttgaaatgaccaaaacaggc

SEQ ID NO: 15254 - RNA, 22 nt, synthetic construct
  source 1..22: mol_type = other RNA
tatttatttgaaatgaccaaaa

SEQ ID NO: 15255 - RNA, 22 nt, synthetic construct
  source 1..22: mol_type = other RNA
tatgattctatttatttgaaat

SEQ ID NO: 15256 - RNA, 22 nt, synthetic construct
  source 1..22: mol_type = other RNA
aagggagaaagcactgatacat

SEQ ID NO: 15257 - RNA, 22 nt, synthetic construct
  source 1..22: mol_type = other RNA
caccattaaagggagaaagcac

SEQ ID NO: 15258 - RNA, 22 nt, synthetic construct
  source 1..22: mol_type = other RNA
cttatctatacaataaagtatt

SEQ ID NO: 15259 - RNA, 22 nt, synthetic construct
  source 1..22: mol_type = other RNA
aaaatagccaaaatataaaaac

SEQ ID NO: 15260 - RNA, 22 nt, synthetic construct
  source 1..22: mol_type = other RNA
acagaaggataattcaaaatag

SEQ ID NO: 15261 - RNA, 22 nt, synthetic construct
  source 1..22: mol_type = other RNA
ataaaacaaaagaaaacaagaa

SEQ ID NO: 15262 - RNA, 22 nt, synthetic construct
  source 1..22: mol_type = other RNA
tgtattaataaaacaaaagaaa

SEQ ID NO: 15263 - RNA, 22 nt, synthetic construct
  source 1..22: mol_type = other RNA
acatataccccataaatatgta

SEQ ID NO: 15264 - RNA, 22 nt, synthetic construct
  source 1..22: mol_type = other RNA
taccttctatgcatgtaataaa

SEQ ID NO: 15265 - RNA, 22 nt, synthetic construct
  source 1..22: mol_type = other RNA
aacaatcccaaatgtggatacc

SEQ ID NO: 15266 - RNA, 22 nt, synthetic construct
  source 1..22: mol_type = other RNA
atctttaaacaatcccaaatgt

SEQ ID NO: 15267 - RNA, 22 nt, synthetic construct
  source 1..22: mol_type = other RNA
aatctttaaacaatcccaaatg

SEQ ID NO: 15268 - RNA, 22 nt, synthetic construct
  source 1..22: mol_type = other RNA
atttaatctttaaacaatccca

SEQ ID NO: 15269 - RNA, 22 nt, synthetic construct
  source 1..22: mol_type = other RNA
catttaatctttaaacaatccc

SEQ ID NO: 15270 - RNA, 22 nt, synthetic construct
  source 1..22: mol_type = other RNA
acactatttcatttaatcttta

SEQ ID NO: 15271 - RNA, 22 nt, synthetic construct
  source 1..22: mol_type = other RNA
aacactatttcatttaatcttt

SEQ ID NO: 15272 - RNA, 22 nt, synthetic construct
  source 1..22: mol_type = other RNA
aatacttttaacactatttcat

SEQ ID NO: 15273 - RNA, 22 nt, synthetic construct
  source 1..22: mol_type = other RNA
aagggcatattaaatactttta

SEQ ID NO: 15274 - RNA, 22 nt, synthetic construct
  source 1..22: mol_type = other RNA
ttgaagggcatattaaatactt

SEQ ID NO: 15275 - RNA, 22 nt, synthetic construct
  source 1..22: mol_type = other RNA
gttgaagggcatattaaatact

SEQ ID NO: 15276 - RNA, 22 nt, synthetic construct
  source 1..22: mol_type = other RNA
ctcatcatttgttgaagggcat

SEQ ID NO: 15277 - RNA, 22 nt, synthetic construct
  source 1..22: mol_type = other RNA
cctcatcatttgttgaagggca

SEQ ID NO: 15278 - RNA, 22 nt, synthetic construct
  source 1..22: mol_type = other RNA
taagatttcctcatcatttgtt

SEQ ID NO: 15279 - RNA, 22 nt, synthetic construct
  source 1..22: mol_type = other RNA
ctaatatgtaaactgaaggagt

SEQ ID NO: 15280 - RNA, 22 nt, synthetic construct
  source 1..22: mol_type = other RNA
cctaatatgtaaactgaaggag

SEQ ID NO: 15281 - RNA, 22 nt, synthetic construct
  source 1..22: mol_type = other RNA
tgtgcctcagtttcctaatatg

SEQ ID NO: 15282 - RNA, 22 nt, synthetic construct
  source 1..22: mol_type = other RNA
ggtggacttgagcaagtctctg

SEQ ID NO: 15283 - RNA, 22 nt, synthetic construct
  source 1..22: mol_type = other RNA
accacaatgctctactgctttg

SEQ ID NO: 15284 - RNA, 22 nt, synthetic construct
  source 1..22: mol_type = other RNA
aaccacaatgctctactgcttt

SEQ ID NO: 15285 - RNA, 22 nt, synthetic construct
  source 1..22: mol_type = other RNA
aacccagacagtctgactgaag

SEQ ID NO: 15286 - RNA, 22 nt, synthetic construct
  source 1..22: mol_type = other RNA
gaacccagacagtctgactgaa

SEQ ID NO: 15287 - RNA, 22 nt, synthetic construct
  source 1..22: mol_type = other RNA
tgtaaggaaacccatgtccaag

SEQ ID NO: 15288 - RNA, 22 nt, synthetic construct
  source 1..22: mol_type = other RNA
atgtaaggaaacccatgtccaa

SEQ ID NO: 15289 - RNA, 22 nt, synthetic construct
  source 1..22: mol_type = other RNA
catatgagaaaactgaggctca

SEQ ID NO: 15290 - RNA, 22 nt, synthetic construct
  source 1..22: mol_type = other RNA
tcctcactttgcatatgagaaa

SEQ ID NO: 15291 - RNA, 22 nt, synthetic construct
  source 1..22: mol_type = other RNA
ttatcctcactttgcatatgag

SEQ ID NO: 15292 - RNA, 22 nt, synthetic construct
  source 1..22: mol_type = other RNA
ttattatcctcactttgcatat

SEQ ID NO: 15293 - RNA, 22 nt, synthetic construct
  source 1..22: mol_type = other RNA
atactcatatcagtaaccatgt

SEQ ID NO: 15294 - RNA, 22 nt, synthetic construct
  source 1..22: mol_type = other RNA
aatactcatatcagtaaccatg

SEQ ID NO: 15295 - RNA, 22 nt, synthetic construct
  source 1..22: mol_type = other RNA
taaagcacctcctatacgccag

SEQ ID NO: 15296 - RNA, 22 nt, synthetic construct
  source 1..22: mol_type = other RNA
ataaagcacctcctatacgcca

SEQ ID NO: 15297 - RNA, 22 nt, synthetic construct
  source 1..22: mol_type = other RNA
gcaatgccatgagtggtaacag

SEQ ID NO: 15298 - RNA, 22 nt, synthetic construct
  source 1..22: mol_type = other RNA
ggcaatgccatgagtggtaaca

SEQ ID NO: 15299 - RNA, 22 nt, synthetic construct
  source 1..22: mol_type = other RNA
catcaatctcacaccagagagt

SEQ ID NO: 15300 - RNA, 22 nt, synthetic construct
  source 1..22: mol_type = other RNA
ccttcctccaaggaacttacaa

SEQ ID NO: 15301 - RNA, 22 nt, synthetic construct
  source 1..22: mol_type = other RNA
agcacctcttatatgctcagcg

SEQ ID NO: 15302 - RNA, 22 nt, synthetic construct
  source 1..22: mol_type = other RNA
acacctacaacaactcccagct

SEQ ID NO: 15303 - RNA, 22 nt, synthetic construct
  source 1..22: mol_type = other RNA
gaaagaggcagaaaattgacac

SEQ ID NO: 15304 - RNA, 22 nt, synthetic construct
  source 1..22: mol_type = other RNA
agaagctccaggtagccacctt

SEQ ID NO: 15305 - RNA, 22 nt, synthetic construct
  source 1..22: mol_type = other RNA
ccgtctctacagcaagctgagg

SEQ ID NO: 15306 - RNA, 22 nt, synthetic construct
  source 1..22: mol_type = other RNA
ccctgattgccgtctctacagc

SEQ ID NO: 15307 - RNA, 22 nt, synthetic construct
  source 1..22: mol_type = other RNA
cccctgattgccgtctctacag

SEQ ID NO: 15308 - RNA, 22 nt, synthetic construct
  source 1..22: mol_type = other RNA
tggaaagagggctggtggggaa

SEQ ID NO: 15309 - RNA, 22 nt, synthetic construct
  source 1..22: mol_type = other RNA
ctggaaagagggctggtgggga

SEQ ID NO: 15310 - RNA, 22 nt, synthetic construct
  source 1..22: mol_type = other RNA
tgggaggaaaagtcccttggat

SEQ ID NO: 15311 - RNA, 22 nt, synthetic construct
  source 1..22: mol_type = other RNA
atggtgtctgtgtcgggttctg

SEQ ID NO: 15312 - RNA, 22 nt, synthetic construct
  source 1..22: mol_type = other RNA
gcataagcctccctggtctctt

SEQ ID NO: 15313 - RNA, 22 nt, synthetic construct
  source 1..22: mol_type = other RNA
tgggctcaggtgcttcctcacc

SEQ ID NO: 15314 - RNA, 22 nt, synthetic construct
  source 1..22: mol_type = other RNA
ctgggctcaggtgcttcctcac

SEQ ID NO: 15315 - RNA, 22 nt, synthetic construct
  source 1..22: mol_type = other RNA
tccttttctgggctcaggtgct

SEQ ID NO: 15316 - RNA, 22 nt, synthetic construct
  source 1..22: mol_type = other RNA
acaagtggcagcaaagaactct

SEQ ID NO: 15317 - RNA, 22 nt, synthetic construct
  source 1..22: mol_type = other RNA
tgtgggaggggactgacgtggc

SEQ ID NO: 15318 - RNA, 22 nt, synthetic construct
  source 1..22: mol_type = other RNA
ctgtgggaggggactgacgtgg

SEQ ID NO: 15319 - RNA, 22 nt, synthetic construct
  source 1..22: mol_type = other RNA
ctccgcatcccccttgcaatga

SEQ ID NO: 15320 - RNA, 22 nt, synthetic construct
  source 1..22: mol_type = other RNA
ctccagccattgctccgcatcc

SEQ ID NO: 15321 - RNA, 22 nt, synthetic construct
  source 1..22: mol_type = other RNA
ccccactggcctccatctcccc

SEQ ID NO: 15322 - RNA, 22 nt, synthetic construct
  source 1..22: mol_type = other RNA
cccccactggcctccatctccc

SEQ ID NO: 15323 - RNA, 22 nt, synthetic construct
  source 1..22: mol_type = other RNA
gtgaaggggcctatttccccca

SEQ ID NO: 15324 - RNA, 22 nt, synthetic construct
  source 1..22: mol_type = other RNA
ttggtggtcattagtgaagggg

SEQ ID NO: 15325 - RNA, 22 nt, synthetic construct
  source 1..22: mol_type = other RNA
cttggtggtcattagtgaaggg

SEQ ID NO: 15326 - RNA, 22 nt, synthetic construct
  source 1..22: mol_type = other RNA
tcttggtggtcattagtgaagg

SEQ ID NO: 15327 - RNA, 22 nt, synthetic construct
  source 1..22: mol_type = other RNA
ttttcttggtggtcattagtga

SEQ ID NO: 15328 - RNA, 22 nt, synthetic construct
  source 1..22: mol_type = other RNA
gttttcttggtggtcattagtg

SEQ ID NO: 15329 - RNA, 22 nt, synthetic construct
  source 1..22: mol_type = other RNA
tgttttcttggtggtcattagt

SEQ ID NO: 15330 - RNA, 22 nt, synthetic construct
  source 1..22: mol_type = other RNA
tagaaaggatggacagaagagc

SEQ ID NO: 15331 - RNA, 22 nt, synthetic construct
  source 1..22: mol_type = other RNA
caaatactagagtagcttggct

SEQ ID NO: 15332 - RNA, 22 nt, synthetic construct
  source 1..22: mol_type = other RNA
ttacaaatactagagtagcttg

SEQ ID NO: 15333 - RNA, 22 nt, synthetic construct
  source 1..22: mol_type = other RNA
cagatgataatgtatggacagc

SEQ ID NO: 15334 - RNA, 22 nt, synthetic construct
  source 1..22: mol_type = other RNA
taaggattccagatgataatgt

SEQ ID NO: 15335 - RNA, 22 nt, synthetic construct
  source 1..22: mol_type = other RNA
ttgtaaggattccagatgataa

SEQ ID NO: 15336 - RNA, 22 nt, synthetic construct
  source 1..22: mol_type = other RNA
ttgttgtaaggattccagatga

SEQ ID NO: 15337 - RNA, 22 nt, synthetic construct
  source 1..22: mol_type = other RNA
ctttgttgttgtaaggattcca

SEQ ID NO: 15338 - RNA, 22 nt, synthetic construct
  source 1..22: mol_type = other RNA
cctttgttgttgtaaggattcc

SEQ ID NO: 15339 - RNA, 22 nt, synthetic construct
  source 1..22: mol_type = other RNA
taaaagacagaaactaataata

SEQ ID NO: 15340 - RNA, 22 nt, synthetic construct
  source 1..22: mol_type = other RNA
gtaaaagacagaaactaataat

SEQ ID NO: 15341 - RNA, 22 nt, synthetic construct
  source 1..22: mol_type = other RNA
ctcatttgtaaaagacagaaac

SEQ ID NO: 15342 - RNA, 22 nt, synthetic construct
  source 1..22: mol_type = other RNA
cctcatttgtaaaagacagaaa

SEQ ID NO: 15343 - RNA, 22 nt, synthetic construct
  source 1..22: mol_type = other RNA
acctctctaaacctcaatttcc

SEQ ID NO: 15344 - RNA, 22 nt, synthetic construct
  source 1..22: mol_type = other RNA
cacctctctaaacctcaatttc

SEQ ID NO: 15345 - RNA, 22 nt, synthetic construct
  source 1..22: mol_type = other RNA
ctatctctaatgcaaacttggg

SEQ ID NO: 15346 - RNA, 22 nt, synthetic construct
  source 1..22: mol_type = other RNA
agatctgtacattactatctct

SEQ ID NO: 15347 - RNA, 22 nt, synthetic construct
  source 1..22: mol_type = other RNA
cagatctgtacattactatctc

SEQ ID NO: 15348 - RNA, 22 nt, synthetic construct
  source 1..22: mol_type = other RNA
gaatttcagatctgtacattac

SEQ ID NO: 15349 - RNA, 22 nt, synthetic construct
  source 1..22: mol_type = other RNA
aaacgagaaagacctaggttag

SEQ ID NO: 15350 - RNA, 22 nt, synthetic construct
  source 1..22: mol_type = other RNA
aaaatggagactttgaaacgag

SEQ ID NO: 15351 - RNA, 22 nt, synthetic construct
  source 1..22: mol_type = other RNA
tggttaaaaatggagactttga

SEQ ID NO: 15352 - RNA, 22 nt, synthetic construct
  source 1..22: mol_type = other RNA
gtggttaaaaatggagactttg

SEQ ID NO: 15353 - RNA, 22 nt, synthetic construct
  source 1..22: mol_type = other RNA
tgtggttaaaaatggagacttt

SEQ ID NO: 15354 - RNA, 22 nt, synthetic construct
  source 1..22: mol_type = other RNA
ttgtggttaaaaatggagactt

SEQ ID NO: 15355 - RNA, 22 nt, synthetic construct
  source 1..22: mol_type = other RNA
tttgtggttaaaaatggagact

SEQ ID NO: 15356 - RNA, 22 nt, synthetic construct
  source 1..22: mol_type = other RNA
tttttttgtggttaaaaatgga

SEQ ID NO: 15357 - RNA, 22 nt, synthetic construct
  source 1..22: mol_type = other RNA
gcttctctgcttaagccttagc

SEQ ID NO: 15358 - RNA, 22 nt, synthetic construct
  source 1..22: mol_type = other RNA
tctatcccacgtctctccccca

SEQ ID NO: 15359 - RNA, 22 nt, synthetic construct
  source 1..22: mol_type = other RNA
aacataggctctgtatgaggtg

SEQ ID NO: 15360 - RNA, 22 nt, synthetic construct
  source 1..22: mol_type = other RNA
caacataggctctgtatgaggt

SEQ ID NO: 15361 - RNA, 22 nt, synthetic construct
  source 1..22: mol_type = other RNA
tatttcaacataggctctgtat

SEQ ID NO: 15362 - RNA, 22 nt, synthetic construct
  source 1..22: mol_type = other RNA
ctatttcaacataggctctgta

SEQ ID NO: 15363 - RNA, 22 nt, synthetic construct
  source 1..22: mol_type = other RNA
tctatttcaacataggctctgt

SEQ ID NO: 15364 - RNA, 22 nt, synthetic construct
  source 1..22: mol_type = other RNA
ttctatttcaacataggctctg

SEQ ID NO: 15365 - RNA, 22 nt, synthetic construct
  source 1..22: mol_type = other RNA
cttcctggtaggggctgcatcc

SEQ ID NO: 15366 - RNA, 22 nt, synthetic construct
  source 1..22: mol_type = other RNA
ctagccaagcagttacttcctg

SEQ ID NO: 15367 - RNA, 22 nt, synthetic construct
  source 1..22: mol_type = other RNA
actgcacacaggtgcccaagcc

SEQ ID NO: 15368 - RNA, 22 nt, synthetic construct
  source 1..22: mol_type = other RNA
ttcactgcacacaggtgcccaa

SEQ ID NO: 15369 - RNA, 22 nt, synthetic construct
  source 1..22: mol_type = other RNA
caggttgttcactgcacacagg

SEQ ID NO: 15370 - RNA, 22 nt, synthetic construct
  source 1..22: mol_type = other RNA
gcaggttgttcactgcacacag

SEQ ID NO: 15371 - RNA, 22 nt, synthetic construct
  source 1..22: mol_type = other RNA
tgcaggttgttcactgcacaca

SEQ ID NO: 15372 - RNA, 22 nt, synthetic construct
  source 1..22: mol_type = other RNA
gcaggaagaagaccactaagaa

SEQ ID NO: 15373 - RNA, 22 nt, synthetic construct
  source 1..22: mol_type = other RNA
ctgggttggcaggaagaagacc

SEQ ID NO: 15374 - RNA, 22 nt, synthetic construct
  source 1..22: mol_type = other RNA
gatcaagcacagaactgctgaa

SEQ ID NO: 15375 - RNA, 22 nt, synthetic construct
  source 1..22: mol_type = other RNA
ggatcaagcacagaactgctga

SEQ ID NO: 15376 - RNA, 22 nt, synthetic construct
  source 1..22: mol_type = other RNA
gccacatttggatcaagcacag

SEQ ID NO: 15377 - RNA, 22 nt, synthetic construct
  source 1..22: mol_type = other RNA
aatacactgtgctctggggaaa

SEQ ID NO: 15378 - RNA, 22 nt, synthetic construct
  source 1..22: mol_type = other RNA
caatacactgtgctctggggaa

SEQ ID NO: 15379 - RNA, 22 nt, synthetic construct
  source 1..22: mol_type = other RNA
tcaatacactgtgctctgggga

SEQ ID NO: 15380 - RNA, 22 nt, synthetic construct
  source 1..22: mol_type = other RNA
ttccttggtatgattttcaata

SEQ ID NO: 15381 - RNA, 22 nt, synthetic construct
  source 1..22: mol_type = other RNA
cttccttggtatgattttcaat

SEQ ID NO: 15382 - RNA, 22 nt, synthetic construct
  source 1..22: mol_type = other RNA
tcttccttggtatgattttcaa

SEQ ID NO: 15383 - RNA, 22 nt, synthetic construct
  source 1..22: mol_type = other RNA
ctagtcccctccattttcttcc

SEQ ID NO: 15384 - RNA, 22 nt, synthetic construct
  source 1..22: mol_type = other RNA
tgaaacatgaacaattactagt

SEQ ID NO: 15385 - RNA, 22 nt, synthetic construct
  source 1..22: mol_type = other RNA
ctgaaacatgaacaattactag

SEQ ID NO: 15386 - RNA, 22 nt, synthetic construct
  source 1..22: mol_type = other RNA
tgtaatttctgaaacatgaaca

SEQ ID NO: 15387 - RNA, 22 nt, synthetic construct
  source 1..22: mol_type = other RNA
tgaggaaatgtgaatgtcctca

SEQ ID NO: 15388 - RNA, 22 nt, synthetic construct
  source 1..22: mol_type = other RNA
gctgcctgtggagatgccacta

SEQ ID NO: 15389 - RNA, 22 nt, synthetic construct
  source 1..22: mol_type = other RNA
cttagacagctttcgctgcctg

SEQ ID NO: 15390 - RNA, 22 nt, synthetic construct
  source 1..22: mol_type = other RNA
gcttagacagctttcgctgcct

SEQ ID NO: 15391 - RNA, 22 nt, synthetic construct
  source 1..22: mol_type = other RNA
agcaacaaaaaatggactaacg

SEQ ID NO: 15392 - RNA, 22 nt, synthetic construct
  source 1..22: mol_type = other RNA
aagcaacaaaaaatggactaac

SEQ ID NO: 15393 - RNA, 22 nt, synthetic construct
  source 1..22: mol_type = other RNA
taagcaacaaaaaatggactaa

SEQ ID NO: 15394 - RNA, 22 nt, synthetic construct
  source 1..22: mol_type = other RNA
ttttaagcaacaaaaaatggac

SEQ ID NO: 15395 - RNA, 22 nt, synthetic construct
  source 1..22: mol_type = other RNA
ctcagtgtcaggtatgttgttt

SEQ ID NO: 15396 - RNA, 22 nt, synthetic construct
  source 1..22: mol_type = other RNA
taaattactcagtgtcaggtat

SEQ ID NO: 15397 - RNA, 22 nt, synthetic construct
  source 1..22: mol_type = other RNA
tttataaattactcagtgtcag

SEQ ID NO: 15398 - RNA, 22 nt, synthetic construct
  source 1..22: mol_type = other RNA
ctttataaattactcagtgtca

SEQ ID NO: 15399 - RNA, 22 nt, synthetic construct
  source 1..22: mol_type = other RNA
tctttataaattactcagtgtc

SEQ ID NO: 15400 - RNA, 22 nt, synthetic construct
  source 1..22: mol_type = other RNA
ttctttataaattactcagtgt

SEQ ID NO: 15401 - RNA, 22 nt, synthetic construct
  source 1..22: mol_type = other RNA
tttctttataaattactcagtg

SEQ ID NO: 15402 - RNA, 22 nt, synthetic construct
  source 1..22: mol_type = other RNA
ttttctttataaattactcagt

SEQ ID NO: 15403 - RNA, 22 nt, synthetic construct
  source 1..22: mol_type = other RNA
tttttctttataaattactcag

SEQ ID NO: 15404 - RNA, 22 nt, synthetic construct
  source 1..22: mol_type = other RNA
tgagaagaggaagagagactat

SEQ ID NO: 15405 - RNA, 22 nt, synthetic construct
  source 1..22: mol_type = other RNA
atgagaagaggaagagagacta

SEQ ID NO: 15406 - RNA, 22 nt, synthetic construct
  source 1..22: mol_type = other RNA
tatgagaagaggaagagagact

SEQ ID NO: 15407 - RNA, 22 nt, synthetic construct
  source 1..22: mol_type = other RNA
tcgtgggagtaagactagtggt

SEQ ID NO: 15408 - RNA, 22 nt, synthetic construct
  source 1..22: mol_type = other RNA
atgggttgtcgtgggagtaaga

SEQ ID NO: 15409 - RNA, 22 nt, synthetic construct
  source 1..22: mol_type = other RNA
ataagttaatgggttgtcgtgg

SEQ ID NO: 15410 - RNA, 22 nt, synthetic construct
  source 1..22: mol_type = other RNA
gtggataaacaggttaataagt

SEQ ID NO: 15411 - RNA, 22 nt, synthetic construct
  source 1..22: mol_type = other RNA
atggattagtggataaacaggt

SEQ ID NO: 15412 - RNA, 22 nt, synthetic construct
  source 1..22: mol_type = other RNA
atccgttcatggattagtggat

SEQ ID NO: 15413 - RNA, 22 nt, synthetic construct
  source 1..22: mol_type = other RNA
cttgatgaatgggttaatccgt

SEQ ID NO: 15414 - RNA, 22 nt, synthetic construct
  source 1..22: mol_type = other RNA
ccttgatgaatgggttaatccg

SEQ ID NO: 15415 - RNA, 22 nt, synthetic construct
  source 1..22: mol_type = other RNA
agaggtgactggggcttttcct

SEQ ID NO: 15416 - RNA, 22 nt, synthetic construct
  source 1..22: mol_type = other RNA
agaggtggggcctttaagaggt

SEQ ID NO: 15417 - RNA, 22 nt, synthetic construct
  source 1..22: mol_type = other RNA
tcttctccaaaactcatgtata

SEQ ID NO: 15418 - RNA, 22 nt, synthetic construct
  source 1..22: mol_type = other RNA
gtcttctccaaaactcatgtat

SEQ ID NO: 15419 - RNA, 22 nt, synthetic construct
  source 1..22: mol_type = other RNA
tgacgtgaatgtttgtcttctc

SEQ ID NO: 15420 - RNA, 22 nt, synthetic construct
  source 1..22: mol_type = other RNA
aggatgctgcaaaagaatactt

SEQ ID NO: 15421 - RNA, 22 nt, synthetic construct
  source 1..22: mol_type = other RNA
caggatgctgcaaaagaatact

SEQ ID NO: 15422 - RNA, 22 nt, synthetic construct
  source 1..22: mol_type = other RNA
gaagctaaggtcatatttcagg

SEQ ID NO: 15423 - RNA, 22 nt, synthetic construct
  source 1..22: mol_type = other RNA
agaagctaaggtcatatttcag

SEQ ID NO: 15424 - RNA, 22 nt, synthetic construct
  source 1..22: mol_type = other RNA
cacatttagaagctaaggtcat

SEQ ID NO: 15425 - RNA, 22 nt, synthetic construct
  source 1..22: mol_type = other RNA
acacatttagaagctaaggtca

SEQ ID NO: 15426 - RNA, 22 nt, synthetic construct
  source 1..22: mol_type = other RNA
tacacatttagaagctaaggtc

SEQ ID NO: 15427 - RNA, 22 nt, synthetic construct
  source 1..22: mol_type = other RNA
tctccattttacacatttagaa

SEQ ID NO: 15428 - RNA, 22 nt, synthetic construct
  source 1..22: mol_type = other RNA
ttatctccattttacacattta

SEQ ID NO: 15429 - RNA, 22 nt, synthetic construct
  source 1..22: mol_type = other RNA
agtcttacaaccatcccgtgat

SEQ ID NO: 15430 - RNA, 22 nt, synthetic construct
  source 1..22: mol_type = other RNA
taacttattcagtcttacaacc

SEQ ID NO: 15431 - RNA, 22 nt, synthetic construct
  source 1..22: mol_type = other RNA
cacattgtaacttattcagtct

SEQ ID NO: 15432 - RNA, 22 nt, synthetic construct
  source 1..22: mol_type = other RNA
taaatgctttacacattgtaac

SEQ ID NO: 15433 - RNA, 22 nt, synthetic construct
  source 1..22: mol_type = other RNA
ctaaatgctttacacattgtaa

SEQ ID NO: 15434 - RNA, 22 nt, synthetic construct
  source 1..22: mol_type = other RNA
cttttctaaatgctttacacat

SEQ ID NO: 15435 - RNA, 22 nt, synthetic construct
  source 1..22: mol_type = other RNA
tggggtagtacctaacatctac

SEQ ID NO: 15436 - RNA, 22 nt, synthetic construct
  source 1..22: mol_type = other RNA
taagcaatggggagccatagaa

SEQ ID NO: 15437 - RNA, 22 nt, synthetic construct
  source 1..22: mol_type = other RNA
ataagcaatggggagccataga

SEQ ID NO: 15438 - RNA, 22 nt, synthetic construct
  source 1..22: mol_type = other RNA
tataagcaatggggagccatag

SEQ ID NO: 15439 - RNA, 22 nt, synthetic construct
  source 1..22: mol_type = other RNA
ggacttgattttataagcaatg

SEQ ID NO: 15440 - RNA, 22 nt, synthetic construct
  source 1..22: mol_type = other RNA
atgctggggaaagttaggactt

SEQ ID NO: 15441 - RNA, 22 nt, synthetic construct
  source 1..22: mol_type = other RNA
catgctggggaaagttaggact

SEQ ID NO: 15442 - RNA, 22 nt, synthetic construct
  source 1..22: mol_type = other RNA
ggaaaccctgagagataggtga

SEQ ID NO: 15443 - RNA, 22 nt, synthetic construct
  source 1..22: mol_type = other RNA
aggaaaccctgagagataggtg

SEQ ID NO: 15444 - RNA, 22 nt, synthetic construct
  source 1..22: mol_type = other RNA
agagtatgtttaggaaaccctg

SEQ ID NO: 15445 - RNA, 22 nt, synthetic construct
  source 1..22: mol_type = other RNA
tgggtcacagtggcagagtgag

SEQ ID NO: 15446 - RNA, 22 nt, synthetic construct
  source 1..22: mol_type = other RNA
tacatctagagcatccaacaca

SEQ ID NO: 15447 - RNA, 22 nt, synthetic construct
  source 1..22: mol_type = other RNA
gaggttctacatctagagcatc

SEQ ID NO: 15448 - RNA, 22 nt, synthetic construct
  source 1..22: mol_type = other RNA
tcatctgtgtaagatgaataaa

SEQ ID NO: 15449 - RNA, 22 nt, synthetic construct
  source 1..22: mol_type = other RNA
ctcatctgtgtaagatgaataa

SEQ ID NO: 15450 - RNA, 22 nt, synthetic construct
  source 1..22: mol_type = other RNA
tctcatctgtgtaagatgaata

SEQ ID NO: 15451 - RNA, 22 nt, synthetic construct
  source 1..22: mol_type = other RNA
accactgtgggcctccattttc

SEQ ID NO: 15452 - RNA, 22 nt, synthetic construct
  source 1..22: mol_type = other RNA
aaccactgtgggcctccatttt

SEQ ID NO: 15453 - RNA, 22 nt, synthetic construct
  source 1..22: mol_type = other RNA
cactagccctactagctgtgca

SEQ ID NO: 15454 - RNA, 22 nt, synthetic construct
  source 1..22: mol_type = other RNA
cacctctactttccactagccc

SEQ ID NO: 15455 - RNA, 22 nt, synthetic construct
  source 1..22: mol_type = other RNA
aaattccacctctactttccac

SEQ ID NO: 15456 - RNA, 22 nt, synthetic construct
  source 1..22: mol_type = other RNA
agttcaaattccacctctactt

SEQ ID NO: 15457 - RNA, 22 nt, synthetic construct
  source 1..22: mol_type = other RNA
gagttcaaattccacctctact

SEQ ID NO: 15458 - RNA, 22 nt, synthetic construct
  source 1..22: mol_type = other RNA
ctgcaggatttgagttcaaatt

SEQ ID NO: 15459 - RNA, 22 nt, synthetic construct
  source 1..22: mol_type = other RNA
aatgaatgaatgatcaaacaaa

SEQ ID NO: 15460 - RNA, 22 nt, synthetic construct
  source 1..22: mol_type = other RNA
ttgaatgaatgaatgatcaaac

SEQ ID NO: 15461 - RNA, 22 nt, synthetic construct
  source 1..22: mol_type = other RNA
gttgaatgaatgaatgatcaaa

SEQ ID NO: 15462 - RNA, 22 nt, synthetic construct
  source 1..22: mol_type = other RNA
cgctgcccagacaaggaaaagc

SEQ ID NO: 15463 - RNA, 22 nt, synthetic construct
  source 1..22: mol_type = other RNA
gggcaccccccagggaacaagg

SEQ ID NO: 15464 - RNA, 22 nt, synthetic construct
  source 1..22: mol_type = other RNA
tacccaccttggggagaggggt

SEQ ID NO: 15465 - RNA, 22 nt, synthetic construct
  source 1..22: mol_type = other RNA
agaaaaaccagagaccaactca

SEQ ID NO: 15466 - RNA, 22 nt, synthetic construct
  source 1..22: mol_type = other RNA
tgcccaacttctgctggcatct

SEQ ID NO: 15467 - RNA, 22 nt, synthetic construct
  source 1..22: mol_type = other RNA
ctgcccaacttctgctggcatc

SEQ ID NO: 15468 - RNA, 22 nt, synthetic construct
  source 1..22: mol_type = other RNA
tgacttttctgcccaacttctg

SEQ ID NO: 15469 - RNA, 22 nt, synthetic construct
  source 1..22: mol_type = other RNA
ctgacttttctgcccaacttct

SEQ ID NO: 15470 - RNA, 22 nt, synthetic construct
  source 1..22: mol_type = other RNA
gatcagggaggggctcactcac

SEQ ID NO: 15471 - RNA, 22 nt, synthetic construct
  source 1..22: mol_type = other RNA
gagtcaaggaaaggccaggtct

SEQ ID NO: 15472 - RNA, 22 nt, synthetic construct
  source 1..22: mol_type = other RNA
gacccacagcaggctttggagt

SEQ ID NO: 15473 - RNA, 22 nt, synthetic construct
  source 1..22: mol_type = other RNA
aagggcctcccaaccagacagg

SEQ ID NO: 15474 - RNA, 22 nt, synthetic construct
  source 1..22: mol_type = other RNA
aaagggcctcccaaccagacag

SEQ ID NO: 15475 - RNA, 22 nt, synthetic construct
  source 1..22: mol_type = other RNA
gcttttaaagggcctcccaacc

SEQ ID NO: 15476 - RNA, 22 nt, synthetic construct
  source 1..22: mol_type = other RNA
aggctcctgttggcttttaaag

SEQ ID NO: 15477 - RNA, 22 nt, synthetic construct
  source 1..22: mol_type = other RNA
aaggctcctgttggcttttaaa

SEQ ID NO: 15478 - RNA, 22 nt, synthetic construct
  source 1..22: mol_type = other RNA
taaggctcctgttggcttttaa

SEQ ID NO: 15479 - RNA, 22 nt, synthetic construct
  source 1..22: mol_type = other RNA
tcagggccatgaaataatcaga

SEQ ID NO: 15480 - RNA, 22 nt, synthetic construct
  source 1..22: mol_type = other RNA
gagggttatcagggccatgaaa

SEQ ID NO: 15481 - RNA, 22 nt, synthetic construct
  source 1..22: mol_type = other RNA
tagccattggagggttatcagg

SEQ ID NO: 15482 - RNA, 22 nt, synthetic construct
  source 1..22: mol_type = other RNA
gtagccattggagggttatcag

SEQ ID NO: 15483 - RNA, 22 nt, synthetic construct
  source 1..22: mol_type = other RNA
tgtagccattggagggttatca

SEQ ID NO: 15484 - RNA, 22 nt, synthetic construct
  source 1..22: mol_type = other RNA
gagagggaggaagggccataca

SEQ ID NO: 15485 - RNA, 22 nt, synthetic construct
  source 1..22: mol_type = other RNA
ggagagggaggaagggccatac

SEQ ID NO: 15486 - RNA, 22 nt, synthetic construct
  source 1..22: mol_type = other RNA
taggagtggagaagctggtggt

SEQ ID NO: 15487 - RNA, 22 nt, synthetic construct
  source 1..22: mol_type = other RNA
cagatagagactatagcaactg

SEQ ID NO: 15488 - RNA, 22 nt, synthetic construct
  source 1..22: mol_type = other RNA
aaaggagtcagccatgggaaga

SEQ ID NO: 15489 - RNA, 22 nt, synthetic construct
  source 1..22: mol_type = other RNA
gccaacaccagaaagattcaaa

SEQ ID NO: 15490 - RNA, 22 nt, synthetic construct
  source 1..22: mol_type = other RNA
agccaacaccagaaagattcaa

SEQ ID NO: 15491 - RNA, 22 nt, synthetic construct
  source 1..22: mol_type = other RNA
caggaagaggtgacagtttagc

SEQ ID NO: 15492 - RNA, 22 nt, synthetic construct
  source 1..22: mol_type = other RNA
aacagatatctactgaggtgct

SEQ ID NO: 15493 - RNA, 22 nt, synthetic construct
  source 1..22: mol_type = other RNA
attcaacagatatctactgagg

SEQ ID NO: 15494 - RNA, 22 nt, synthetic construct
  source 1..22: mol_type = other RNA
cattcaacagatatctactgag

SEQ ID NO: 15495 - RNA, 22 nt, synthetic construct
  source 1..22: mol_type = other RNA
tcattcaacagatatctactga

SEQ ID NO: 15496 - RNA, 22 nt, synthetic construct
  source 1..22: mol_type = other RNA
cagatgttttcattcaacagat

SEQ ID NO: 15497 - RNA, 22 nt, synthetic construct
  source 1..22: mol_type = other RNA
acagatgttttcattcaacaga

SEQ ID NO: 15498 - RNA, 22 nt, synthetic construct
  source 1..22: mol_type = other RNA
tacagatgttttcattcaacag

SEQ ID NO: 15499 - RNA, 22 nt, synthetic construct
  source 1..22: mol_type = other RNA
cacccattttacagatgttttc

SEQ ID NO: 15500 - RNA, 22 nt, synthetic construct
  source 1..22: mol_type = other RNA
actgttacacccattttacaga

SEQ ID NO: 15501 - RNA, 22 nt, synthetic construct
  source 1..22: mol_type = other RNA
agaactgaataaatagatacag

SEQ ID NO: 15502 - RNA, 22 nt, synthetic construct
  source 1..22: mol_type = other RNA
aagaactgaataaatagataca

SEQ ID NO: 15503 - RNA, 22 nt, synthetic construct
  source 1..22: mol_type = other RNA
acctgtttaagaactgaataaa

SEQ ID NO: 15504 - RNA, 22 nt, synthetic construct
  source 1..22: mol_type = other RNA
aaatctcataccctgtgtgcga

SEQ ID NO: 15505 - RNA, 22 nt, synthetic construct
  source 1..22: mol_type = other RNA
aaaatctcataccctgtgtgcg

SEQ ID NO: 15506 - RNA, 22 nt, synthetic construct
  source 1..22: mol_type = other RNA
cacttttaaaatctcataccct

SEQ ID NO: 15507 - RNA, 22 nt, synthetic construct
  source 1..22: mol_type = other RNA
tttgcacttttaaaatctcata

SEQ ID NO: 15508 - RNA, 22 nt, synthetic construct
  source 1..22: mol_type = other RNA
caggtgtgagccgctgcgccca

SEQ ID NO: 15509 - RNA, 22 nt, synthetic construct
  source 1..22: mol_type = other RNA
gccaggcaggtatcaaactcct

SEQ ID NO: 15510 - RNA, 22 nt, synthetic construct
  source 1..22: mol_type = other RNA
accatgttggccaggcaggtat

SEQ ID NO: 15511 - RNA, 22 nt, synthetic construct
  source 1..22: mol_type = other RNA
caccatgttggccaggcaggta

SEQ ID NO: 15512 - RNA, 22 nt, synthetic construct
  source 1..22: mol_type = other RNA
gtagagacgcggtttcaccatg

SEQ ID NO: 15513 - RNA, 22 nt, synthetic construct
  source 1..22: mol_type = other RNA
ggtagagacgcggtttcaccat

SEQ ID NO: 15514 - RNA, 22 nt, synthetic construct
  source 1..22: mol_type = other RNA
tggtagagacgcggtttcacca

SEQ ID NO: 15515 - RNA, 22 nt, synthetic construct
  source 1..22: mol_type = other RNA
ttggtagagacgcggtttcacc

SEQ ID NO: 15516 - RNA, 22 nt, synthetic construct
  source 1..22: mol_type = other RNA
tttggtagagacgcggtttcac

SEQ ID NO: 15517 - RNA, 22 nt, synthetic construct
  source 1..22: mol_type = other RNA
tattttttggtagagacgcggt

SEQ ID NO: 15518 - RNA, 22 nt, synthetic construct
  source 1..22: mol_type = other RNA
gtattttttggtagagacgcgg

SEQ ID NO: 15519 - RNA, 22 nt, synthetic construct
  source 1..22: mol_type = other RNA
tgtattttttggtagagacgcg

SEQ ID NO: 15520 - RNA, 22 nt, synthetic construct
  source 1..22: mol_type = other RNA
ttgtattttttggtagagacgc

SEQ ID NO: 15521 - RNA, 22 nt, synthetic construct
  source 1..22: mol_type = other RNA
caggcgtgcaccaccacacccg

SEQ ID NO: 15522 - RNA, 22 nt, synthetic construct
  source 1..22: mol_type = other RNA
tcctgcctcagcctcccgagta

SEQ ID NO: 15523 - RNA, 22 nt, synthetic construct
  source 1..22: mol_type = other RNA
aagcgattctcctgcctcagcc

SEQ ID NO: 15524 - RNA, 22 nt, synthetic construct
  source 1..22: mol_type = other RNA
agacagagtcttactctgccac

SEQ ID NO: 15525 - RNA, 22 nt, synthetic construct
  source 1..22: mol_type = other RNA
gagacagagtcttactctgcca

SEQ ID NO: 15526 - RNA, 22 nt, synthetic construct
  source 1..22: mol_type = other RNA
tttgagacagagtcttactctg

SEQ ID NO: 15527 - RNA, 22 nt, synthetic construct
  source 1..22: mol_type = other RNA
ttgtttgagacagagtcttact

SEQ ID NO: 15528 - RNA, 22 nt, synthetic construct
  source 1..22: mol_type = other RNA
ttgttgtttgagacagagtctt

SEQ ID NO: 15529 - RNA, 22 nt, synthetic construct
  source 1..22: mol_type = other RNA
gttgttgttgtttgagacagag

SEQ ID NO: 15530 - RNA, 22 nt, synthetic construct
  source 1..22: mol_type = other RNA
ggttgttgttgtttgagacaga

SEQ ID NO: 15531 - RNA, 22 nt, synthetic construct
  source 1..22: mol_type = other RNA
ttttggttgttgttgtttgaga

SEQ ID NO: 15532 - RNA, 22 nt, synthetic construct
  source 1..22: mol_type = other RNA
actgaatattcttttggttgtt

SEQ ID NO: 15533 - RNA, 22 nt, synthetic construct
  source 1..22: mol_type = other RNA
cactgaatattcttttggttgt

SEQ ID NO: 15534 - RNA, 22 nt, synthetic construct
  source 1..22: mol_type = other RNA
tcactgaatattcttttggttg

SEQ ID NO: 15535 - RNA, 22 nt, synthetic construct
  source 1..22: mol_type = other RNA
ttcactgaatattcttttggtt

SEQ ID NO: 15536 - RNA, 22 nt, synthetic construct
  source 1..22: mol_type = other RNA
tttcactgaatattcttttggt

SEQ ID NO: 15537 - RNA, 22 nt, synthetic construct
  source 1..22: mol_type = other RNA
ttttcactgaatattcttttgg

SEQ ID NO: 15538 - RNA, 22 nt, synthetic construct
  source 1..22: mol_type = other RNA
tttttcactgaatattcttttg

SEQ ID NO: 15539 - RNA, 22 nt, synthetic construct
  source 1..22: mol_type = other RNA
ttttttcactgaatattctttt

SEQ ID NO: 15540 - RNA, 22 nt, synthetic construct
  source 1..22: mol_type = other RNA
actaagataggagcaaaactga

SEQ ID NO: 15541 - RNA, 22 nt, synthetic construct
  source 1..22: mol_type = other RNA
tgacaaggcaaaaaggaagctg

SEQ ID NO: 15542 - RNA, 22 nt, synthetic construct
  source 1..22: mol_type = other RNA
ctgacaaggcaaaaaggaagct

SEQ ID NO: 15543 - RNA, 22 nt, synthetic construct
  source 1..22: mol_type = other RNA
tttctgacaaggcaaaaaggaa

SEQ ID NO: 15544 - RNA, 22 nt, synthetic construct
  source 1..22: mol_type = other RNA
aagcaaatacaggagctcgctt

SEQ ID NO: 15545 - RNA, 22 nt, synthetic construct
  source 1..22: mol_type = other RNA
catggaaaattaaagcaaatac

SEQ ID NO: 15546 - RNA, 22 nt, synthetic construct
  source 1..22: mol_type = other RNA
gcatggaaaattaaagcaaata

SEQ ID NO: 15547 - RNA, 22 nt, synthetic construct
  source 1..22: mol_type = other RNA
tcaaatgaaaacataaagaaga

SEQ ID NO: 15548 - RNA, 22 nt, synthetic construct
  source 1..22: mol_type = other RNA
atcaaatgaaaacataaagaag

SEQ ID NO: 15549 - RNA, 22 nt, synthetic construct
  source 1..22: mol_type = other RNA
acaataaaatcttggggggaaa

SEQ ID NO: 15550 - RNA, 22 nt, synthetic construct
  source 1..22: mol_type = other RNA
cagatgtgagccaccacgcctg

SEQ ID NO: 15551 - RNA, 22 nt, synthetic construct
  source 1..22: mol_type = other RNA
gccaggctggtctcaaactctt

SEQ ID NO: 15552 - RNA, 22 nt, synthetic construct
  source 1..22: mol_type = other RNA
accatgttggccaggctggtct

SEQ ID NO: 15553 - RNA, 22 nt, synthetic construct
  source 1..22: mol_type = other RNA
caccatgttggccaggctggtc

SEQ ID NO: 15554 - RNA, 22 nt, synthetic construct
  source 1..22: mol_type = other RNA
gtagagatggggtttcaccatg

SEQ ID NO: 15555 - RNA, 22 nt, synthetic construct
  source 1..22: mol_type = other RNA
agtagagatggggtttcaccat

SEQ ID NO: 15556 - RNA, 22 nt, synthetic construct
  source 1..22: mol_type = other RNA
tagtagagatggggtttcacca

SEQ ID NO: 15557 - RNA, 22 nt, synthetic construct
  source 1..22: mol_type = other RNA
ttagtagagatggggtttcacc

SEQ ID NO: 15558 - RNA, 22 nt, synthetic construct
  source 1..22: mol_type = other RNA
tatttttagtagagatggggtt

SEQ ID NO: 15559 - RNA, 22 nt, synthetic construct
  source 1..22: mol_type = other RNA
gtatttttagtagagatggggt

SEQ ID NO: 15560 - RNA, 22 nt, synthetic construct
  source 1..22: mol_type = other RNA
tgtatttttagtagagatgggg

SEQ ID NO: 15561 - RNA, 22 nt, synthetic construct
  source 1..22: mol_type = other RNA
ttgtatttttagtagagatggg

SEQ ID NO: 15562 - RNA, 22 nt, synthetic construct
  source 1..22: mol_type = other RNA
gccaccacgcctggctaatttt

SEQ ID NO: 15563 - RNA, 22 nt, synthetic construct
  source 1..22: mol_type = other RNA
caggtgttcgccaccacgcctg

SEQ ID NO: 15564 - RNA, 22 nt, synthetic construct
  source 1..22: mol_type = other RNA
tcccaccctagcctccctggta

SEQ ID NO: 15565 - RNA, 22 nt, synthetic construct
  source 1..22: mol_type = other RNA
aagcgattctcccaccctagcc

SEQ ID NO: 15566 - RNA, 22 nt, synthetic construct
  source 1..22: mol_type = other RNA
cccaggctggagtgcactggcg

SEQ ID NO: 15567 - RNA, 22 nt, synthetic construct
  source 1..22: mol_type = other RNA
aaacagagtctagctctgttgc

SEQ ID NO: 15568 - RNA, 22 nt, synthetic construct
  source 1..22: mol_type = other RNA
gaaacagagtctagctctgttg

SEQ ID NO: 15569 - RNA, 22 nt, synthetic construct
  source 1..22: mol_type = other RNA
tgaaacagagtctagctctgtt

SEQ ID NO: 15570 - RNA, 22 nt, synthetic construct
  source 1..22: mol_type = other RNA
ttgaaacagagtctagctctgt

SEQ ID NO: 15571 - RNA, 22 nt, synthetic construct
  source 1..22: mol_type = other RNA
tttgaaacagagtctagctctg

SEQ ID NO: 15572 - RNA, 22 nt, synthetic construct
  source 1..22: mol_type = other RNA
ttttgaaacagagtctagctct

SEQ ID NO: 15573 - RNA, 22 nt, synthetic construct
  source 1..22: mol_type = other RNA
tttttgaaacagagtctagctc

SEQ ID NO: 15574 - RNA, 22 nt, synthetic construct
  source 1..22: mol_type = other RNA
ttttttgaaacagagtctagct

SEQ ID NO: 15575 - RNA, 22 nt, synthetic construct
  source 1..22: mol_type = other RNA
tttttttgaaacagagtctagc

SEQ ID NO: 15576 - RNA, 22 nt, synthetic construct
  source 1..22: mol_type = other RNA
ttttttttgaaacagagtctag

SEQ ID NO: 15577 - RNA, 22 nt, synthetic construct
  source 1..22: mol_type = other RNA
tttttttttgaaacagagtcta

SEQ ID NO: 15578 - RNA, 22 nt, synthetic construct
  source 1..22: mol_type = other RNA
ttttttttttgaaacagagtct

SEQ ID NO: 15579 - RNA, 22 nt, synthetic construct
  source 1..22: mol_type = other RNA
tttttttttttgaaacagagtc

SEQ ID NO: 15580 - RNA, 22 nt, synthetic construct
  source 1..22: mol_type = other RNA
ttttttttttttgaaacagagt

SEQ ID NO: 15581 - RNA, 22 nt, synthetic construct
  source 1..22: mol_type = other RNA
tatcttgaaaacattttttttt

SEQ ID NO: 15582 - RNA, 22 nt, synthetic construct
  source 1..22: mol_type = other RNA
ttgtatcttgaaaacatttttt

SEQ ID NO: 15583 - RNA, 22 nt, synthetic construct
  source 1..22: mol_type = other RNA
attgtatcttgaaaacattttt

SEQ ID NO: 15584 - RNA, 22 nt, synthetic construct
  source 1..22: mol_type = other RNA
acttttattgtatcttgaaaac

SEQ ID NO: 15585 - RNA, 22 nt, synthetic construct
  source 1..22: mol_type = other RNA
tttcacttttattgtatcttga

SEQ ID NO: 15586 - RNA, 22 nt, synthetic construct
  source 1..22: mol_type = other RNA
tagaatcaaaatggtacatggt

SEQ ID NO: 15587 - RNA, 22 nt, synthetic construct
  source 1..22: mol_type = other RNA
attgtagaatcaaaatggtaca

SEQ ID NO: 15588 - RNA, 22 nt, synthetic construct
  source 1..22: mol_type = other RNA
aaatgtaccaaaaatataatga

SEQ ID NO: 15589 - RNA, 22 nt, synthetic construct
  source 1..22: mol_type = other RNA
aaatgtacattgaaatgtacca

SEQ ID NO: 15590 - RNA, 22 nt, synthetic construct
  source 1..22: mol_type = other RNA
gaaatgtacattgaaatgtacc

SEQ ID NO: 15591 - RNA, 22 nt, synthetic construct
  source 1..22: mol_type = other RNA
catttgaaatgtacattgaaat

SEQ ID NO: 15592 - RNA, 22 nt, synthetic construct
  source 1..22: mol_type = other RNA
acatttgaaatgtacattgaaa

SEQ ID NO: 15593 - RNA, 22 nt, synthetic construct
  source 1..22: mol_type = other RNA
atctacccaacgaaacactgca

SEQ ID NO: 15594 - RNA, 22 nt, synthetic construct
  source 1..22: mol_type = other RNA
tggttcatctacccaacgaaac

SEQ ID NO: 15595 - RNA, 22 nt, synthetic construct
  source 1..22: mol_type = other RNA
aaaacccacgtgtcccttagca

SEQ ID NO: 15596 - RNA, 22 nt, synthetic construct
  source 1..22: mol_type = other RNA
caggagtatgccagaaatcagt

SEQ ID NO: 15597 - RNA, 22 nt, synthetic construct
  source 1..22: mol_type = other RNA
ctacattgcaggagtatgccag

SEQ ID NO: 15598 - RNA, 22 nt, synthetic construct
  source 1..22: mol_type = other RNA
atctcacatctatgaaatgggg

SEQ ID NO: 15599 - RNA, 22 nt, synthetic construct
  source 1..22: mol_type = other RNA
caatgcagcttctctgaacctt

SEQ ID NO: 15600 - RNA, 22 nt, synthetic construct
  source 1..22: mol_type = other RNA
aaccgcttcctagctgtgtgcc

SEQ ID NO: 15601 - RNA, 22 nt, synthetic construct
  source 1..22: mol_type = other RNA
gaaccgcttcctagctgtgtgc

SEQ ID NO: 15602 - RNA, 22 nt, synthetic construct
  source 1..22: mol_type = other RNA
agccaaaaaacaaaacaaaaca

SEQ ID NO: 15603 - RNA, 22 nt, synthetic construct
  source 1..22: mol_type = other RNA
gagccaaaaaacaaaacaaaac

SEQ ID NO: 15604 - RNA, 22 nt, synthetic construct
  source 1..22: mol_type = other RNA
caaccccagctccttggcttga

SEQ ID NO: 15605 - RNA, 22 nt, synthetic construct
  source 1..22: mol_type = other RNA
ctcccctcgctctaacattcca

SEQ ID NO: 15606 - RNA, 22 nt, synthetic construct
  source 1..22: mol_type = other RNA
cctcccctcgctctaacattcc

SEQ ID NO: 15607 - RNA, 22 nt, synthetic construct
  source 1..22: mol_type = other RNA
tcctcccctcgctctaacattc

SEQ ID NO: 15608 - RNA, 22 nt, synthetic construct
  source 1..22: mol_type = other RNA
aatctcttccatcccctcccca

SEQ ID NO: 15609 - RNA, 22 nt, synthetic construct
  source 1..22: mol_type = other RNA
gctccaagcccctaccaccttc

SEQ ID NO: 15610 - RNA, 22 nt, synthetic construct
  source 1..22: mol_type = other RNA
atcagcaactgctctgtgccag

SEQ ID NO: 15611 - RNA, 22 nt, synthetic construct
  source 1..22: mol_type = other RNA
gagactgggtgcttggaggggc

SEQ ID NO: 15612 - RNA, 22 nt, synthetic construct
  source 1..22: mol_type = other RNA
aacagcgcaggcagtggcaggc

SEQ ID NO: 15613 - RNA, 22 nt, synthetic construct
  source 1..22: mol_type = other RNA
tccaggcgcatctggccggagg

SEQ ID NO: 15614 - RNA, 22 nt, synthetic construct
  source 1..22: mol_type = other RNA
ctccaggcgcatctggccggag

SEQ ID NO: 15615 - RNA, 22 nt, synthetic construct
  source 1..22: mol_type = other RNA
tctccaggcgcatctggccgga

SEQ ID NO: 15616 - RNA, 22 nt, synthetic construct
  source 1..22: mol_type = other RNA
ctgacagtccctgccttagtgt

SEQ ID NO: 15617 - RNA, 22 nt, synthetic construct
  source 1..22: mol_type = other RNA
gggagaggtgaggtccagttcc

SEQ ID NO: 15618 - RNA, 22 nt, synthetic construct
  source 1..22: mol_type = other RNA
agctgacgggggccccaaggat

SEQ ID NO: 15619 - RNA, 22 nt, synthetic construct
  source 1..22: mol_type = other RNA
tctgccagggattgagctgacg

SEQ ID NO: 15620 - RNA, 22 nt, synthetic construct
  source 1..22: mol_type = other RNA
cttctgaggcatgttctctgcc

SEQ ID NO: 15621 - RNA, 22 nt, synthetic construct
  source 1..22: mol_type = other RNA
ccttctgaggcatgttctctgc

SEQ ID NO: 15622 - RNA, 22 nt, synthetic construct
  source 1..22: mol_type = other RNA
cctcctgatgctcgcacggatg

SEQ ID NO: 15623 - RNA, 22 nt, synthetic construct
  source 1..22: mol_type = other RNA
gtggagattccctcctgatgct

SEQ ID NO: 15624 - RNA, 22 nt, synthetic construct
  source 1..22: mol_type = other RNA
gcacagagaaggggctccatga

SEQ ID NO: 15625 - RNA, 22 nt, synthetic construct
  source 1..22: mol_type = other RNA
ttagcacctagcagagcagttg

SEQ ID NO: 15626 - RNA, 22 nt, synthetic construct
  source 1..22: mol_type = other RNA
tgtcctgccctgatggaattct

SEQ ID NO: 15627 - RNA, 22 nt, synthetic construct
  source 1..22: mol_type = other RNA
ctgtcctgccctgatggaattc

SEQ ID NO: 15628 - RNA, 22 nt, synthetic construct
  source 1..22: mol_type = other RNA
cctaagagcagtagctgtttct

SEQ ID NO: 15629 - RNA, 22 nt, synthetic construct
  source 1..22: mol_type = other RNA
ccctaagagcagtagctgtttc

SEQ ID NO: 15630 - RNA, 22 nt, synthetic construct
  source 1..22: mol_type = other RNA
atgtctgacccccctaaagggc

SEQ ID NO: 15631 - RNA, 22 nt, synthetic construct
  source 1..22: mol_type = other RNA
attaatgtctgacccccctaaa

SEQ ID NO: 15632 - RNA, 22 nt, synthetic construct
  source 1..22: mol_type = other RNA
gattaatgtctgacccccctaa

SEQ ID NO: 15633 - RNA, 22 nt, synthetic construct
  source 1..22: mol_type = other RNA
cttatttgattaatgtctgacc

SEQ ID NO: 15634 - RNA, 22 nt, synthetic construct
  source 1..22: mol_type = other RNA
gcttatttgattaatgtctgac

SEQ ID NO: 15635 - RNA, 22 nt, synthetic construct
  source 1..22: mol_type = other RNA
tgcttttgcttatttgattaat

SEQ ID NO: 15636 - RNA, 22 nt, synthetic construct
  source 1..22: mol_type = other RNA
cgattctgcttttgcttatttg

SEQ ID NO: 15637 - RNA, 22 nt, synthetic construct
  source 1..22: mol_type = other RNA
gcgattctgcttttgcttattt

SEQ ID NO: 15638 - RNA, 22 nt, synthetic construct
  source 1..22: mol_type = other RNA
aggcagctcaacgaggaactgg

SEQ ID NO: 15639 - RNA, 22 nt, synthetic construct
  source 1..22: mol_type = other RNA
ccagagcccatggggcagagtg

SEQ ID NO: 15640 - RNA, 22 nt, synthetic construct
  source 1..22: mol_type = other RNA
gccagagcccatggggcagagt

SEQ ID NO: 15641 - RNA, 22 nt, synthetic construct
  source 1..22: mol_type = other RNA
cagcctcagagatttgccagag

SEQ ID NO: 15642 - RNA, 22 nt, synthetic construct
  source 1..22: mol_type = other RNA
tgctggggagggaggatcatga

SEQ ID NO: 15643 - RNA, 22 nt, synthetic construct
  source 1..22: mol_type = other RNA
ggaaatagggacagagaaagtt

SEQ ID NO: 15644 - RNA, 22 nt, synthetic construct
  source 1..22: mol_type = other RNA
gggaaatagggacagagaaagt

SEQ ID NO: 15645 - RNA, 22 nt, synthetic construct
  source 1..22: mol_type = other RNA
tgggaaatagggacagagaaag

SEQ ID NO: 15646 - RNA, 22 nt, synthetic construct
  source 1..22: mol_type = other RNA
ttgggaaatagggacagagaaa

SEQ ID NO: 15647 - RNA, 22 nt, synthetic construct
  source 1..22: mol_type = other RNA
atttttgggaaatagggacaga

SEQ ID NO: 15648 - RNA, 22 nt, synthetic construct
  source 1..22: mol_type = other RNA
aaaaaaataaggaaaaactaag

SEQ ID NO: 15649 - RNA, 22 nt, synthetic construct
  source 1..22: mol_type = other RNA
aaaaaaaataaggaaaaactaa

SEQ ID NO: 15650 - RNA, 22 nt, synthetic construct
  source 1..22: mol_type = other RNA
aaaacaaaaacatttaaaaaaa

SEQ ID NO: 15651 - RNA, 22 nt, synthetic construct
  source 1..22: mol_type = other RNA
aaaaacaaaaacatttaaaaaa

SEQ ID NO: 15652 - RNA, 22 nt, synthetic construct
  source 1..22: mol_type = other RNA
caatttaaaaacaaaaacattt

SEQ ID NO: 15653 - RNA, 22 nt, synthetic construct
  source 1..22: mol_type = other RNA
atgttgcaatttaaaaacaaaa

SEQ ID NO: 15654 - RNA, 22 nt, synthetic construct
  source 1..22: mol_type = other RNA
gtgagcatgtattgatgttgca

SEQ ID NO: 15655 - RNA, 22 nt, synthetic construct
  source 1..22: mol_type = other RNA
gcttattagtgagcatgtattg

SEQ ID NO: 15656 - RNA, 22 nt, synthetic construct
  source 1..22: mol_type = other RNA
ttgtaaacatcacttgtcatta

SEQ ID NO: 15657 - RNA, 22 nt, synthetic construct
  source 1..22: mol_type = other RNA
acatcagtatactaaaagagtg

SEQ ID NO: 15658 - RNA, 22 nt, synthetic construct
  source 1..22: mol_type = other RNA
ggaaacaagacaaatcagagaa

SEQ ID NO: 15659 - RNA, 22 nt, synthetic construct
  source 1..22: mol_type = other RNA
ctgattaggaaacaagacaaat

SEQ ID NO: 15660 - RNA, 22 nt, synthetic construct
  source 1..22: mol_type = other RNA
actgattaggaaacaagacaaa

SEQ ID NO: 15661 - RNA, 22 nt, synthetic construct
  source 1..22: mol_type = other RNA
tactgattaggaaacaagacaa

SEQ ID NO: 15662 - RNA, 22 nt, synthetic construct
  source 1..22: mol_type = other RNA
tactgaaactgtcttgcaacca

SEQ ID NO: 15663 - RNA, 22 nt, synthetic construct
  source 1..22: mol_type = other RNA
ctagatatcaggaactgcttct

SEQ ID NO: 15664 - RNA, 22 nt, synthetic construct
  source 1..22: mol_type = other RNA
cctagatatcaggaactgcttc

SEQ ID NO: 15665 - RNA, 22 nt, synthetic construct
  source 1..22: mol_type = other RNA
tcctagatatcaggaactgctt

SEQ ID NO: 15666 - RNA, 22 nt, synthetic construct
  source 1..22: mol_type = other RNA
cactcttcctgctgtgtggtca

SEQ ID NO: 15667 - RNA, 22 nt, synthetic construct
  source 1..22: mol_type = other RNA
gctcataaggaacttagggcag

SEQ ID NO: 15668 - RNA, 22 nt, synthetic construct
  source 1..22: mol_type = other RNA
caatctgtgaaatgggtgcaat

SEQ ID NO: 15669 - RNA, 22 nt, synthetic construct
  source 1..22: mol_type = other RNA
ccaatctgtgaaatgggtgcaa

SEQ ID NO: 15670 - RNA, 22 nt, synthetic construct
  source 1..22: mol_type = other RNA
catctagctcctggaaccttgc

SEQ ID NO: 15671 - RNA, 22 nt, synthetic construct
  source 1..22: mol_type = other RNA
aggacagagctgaagaaagagc

SEQ ID NO: 15672 - RNA, 22 nt, synthetic construct
  source 1..22: mol_type = other RNA
caggacagagctgaagaaagag

SEQ ID NO: 15673 - RNA, 22 nt, synthetic construct
  source 1..22: mol_type = other RNA
cagaaatgcacttgggtcaccc

SEQ ID NO: 15674 - RNA, 22 nt, synthetic construct
  source 1..22: mol_type = other RNA
attccagaaatgcacttgggtc

SEQ ID NO: 15675 - RNA, 22 nt, synthetic construct
  source 1..22: mol_type = other RNA
ggggtggagagtggtgtgagaa

SEQ ID NO: 15676 - RNA, 22 nt, synthetic construct
  source 1..22: mol_type = other RNA
ggaggccgtggacagtgaatcc

SEQ ID NO: 15677 - RNA, 22 nt, synthetic construct
  source 1..22: mol_type = other RNA
aggcatgctgggcaggtcagtg

SEQ ID NO: 15678 - RNA, 22 nt, synthetic construct
  source 1..22: mol_type = other RNA
ctcgggaggtcagggcaggttc

SEQ ID NO: 15679 - RNA, 22 nt, synthetic construct
  source 1..22: mol_type = other RNA
gctcgggaggtcagggcaggtt

SEQ ID NO: 15680 - RNA, 22 nt, synthetic construct
  source 1..22: mol_type = other RNA
cttccccagggcctcgatcctg

SEQ ID NO: 15681 - RNA, 22 nt, synthetic construct
  source 1..22: mol_type = other RNA
agacaattccttccccagggcc

SEQ ID NO: 15682 - RNA, 22 nt, synthetic construct
  source 1..22: mol_type = other RNA
gagacaattccttccccagggc

SEQ ID NO: 15683 - RNA, 22 nt, synthetic construct
  source 1..22: mol_type = other RNA
cttgtggatcttatttgagaca

SEQ ID NO: 15684 - RNA, 22 nt, synthetic construct
  source 1..22: mol_type = other RNA
tccctacaggcagctttgcttg

SEQ ID NO: 15685 - RNA, 22 nt, synthetic construct
  source 1..22: mol_type = other RNA
ccccacaaccatgcctccactc

SEQ ID NO: 15686 - RNA, 22 nt, synthetic construct
  source 1..22: mol_type = other RNA
tctagctgtccattcccccaca

SEQ ID NO: 15687 - RNA, 22 nt, synthetic construct
  source 1..22: mol_type = other RNA
gatgggatgtggattctctagc

SEQ ID NO: 15688 - RNA, 22 nt, synthetic construct
  source 1..22: mol_type = other RNA
ggatgggatgtggattctctag

SEQ ID NO: 15689 - RNA, 22 nt, synthetic construct
  source 1..22: mol_type = other RNA
tgctgggtaacaagcagctgaa

SEQ ID NO: 15690 - RNA, 22 nt, synthetic construct
  source 1..22: mol_type = other RNA
ctgctgggtaacaagcagctga

SEQ ID NO: 15691 - RNA, 22 nt, synthetic construct
  source 1..22: mol_type = other RNA
tctggcttttctgctgggtaac

SEQ ID NO: 15692 - RNA, 22 nt, synthetic construct
  source 1..22: mol_type = other RNA
aacttcaaaagatctgaccaca

SEQ ID NO: 15693 - RNA, 22 nt, synthetic construct
  source 1..22: mol_type = other RNA
caacttcaaaagatctgaccac

SEQ ID NO: 15694 - RNA, 22 nt, synthetic construct
  source 1..22: mol_type = other RNA
tcaacttcaaaagatctgacca

SEQ ID NO: 15695 - RNA, 22 nt, synthetic construct
  source 1..22: mol_type = other RNA
aaaaatcacaatatctatgtaa

SEQ ID NO: 15696 - RNA, 22 nt, synthetic construct
  source 1..22: mol_type = other RNA
cagtgatctgagatcgcaccac

SEQ ID NO: 15697 - RNA, 22 nt, synthetic construct
  source 1..22: mol_type = other RNA
cagctgctccggaggctgaggc

SEQ ID NO: 15698 - RNA, 22 nt, synthetic construct
  source 1..22: mol_type = other RNA
gctgggtgtgacggtgcacacc

SEQ ID NO: 15699 - RNA, 22 nt, synthetic construct
  source 1..22: mol_type = other RNA
caaaaattggctgggtgtgacg

SEQ ID NO: 15700 - RNA, 22 nt, synthetic construct
  source 1..22: mol_type = other RNA
aacttgtctctactgaaattac

SEQ ID NO: 15701 - RNA, 22 nt, synthetic construct
  source 1..22: mol_type = other RNA
gagaccagcctggccaacatgg

SEQ ID NO: 15702 - RNA, 22 nt, synthetic construct
  source 1..22: mol_type = other RNA
ggaggtcgaggcaggtggatca

SEQ ID NO: 15703 - RNA, 22 nt, synthetic construct
  source 1..22: mol_type = other RNA
aaaaagaaaatcgcaatatcag

SEQ ID NO: 15704 - RNA, 22 nt, synthetic construct
  source 1..22: mol_type = other RNA
aaaaaagaaaatcgcaatatca

SEQ ID NO: 15705 - RNA, 22 nt, synthetic construct
  source 1..22: mol_type = other RNA
actcatgtttaaaaaagaaaat

SEQ ID NO: 15706 - RNA, 22 nt, synthetic construct
  source 1..22: mol_type = other RNA
cactcatgtttaaaaaagaaaa

SEQ ID NO: 15707 - RNA, 22 nt, synthetic construct
  source 1..22: mol_type = other RNA
aaaatttcactcatgtttaaaa

SEQ ID NO: 15708 - RNA, 22 nt, synthetic construct
  source 1..22: mol_type = other RNA
aaaaatttcactcatgtttaaa

SEQ ID NO: 15709 - RNA, 22 nt, synthetic construct
  source 1..22: mol_type = other RNA
gccaactgtacttttaaaaatt

SEQ ID NO: 15710 - RNA, 22 nt, synthetic construct
  source 1..22: mol_type = other RNA
tttggccaactgtacttttaaa

SEQ ID NO: 15711 - RNA, 22 nt, synthetic construct
  source 1..22: mol_type = other RNA
taagatagcggcctgaggctgt

SEQ ID NO: 15712 - RNA, 22 nt, synthetic construct
  source 1..22: mol_type = other RNA
ccaagatggaggttataagata

SEQ ID NO: 15713 - RNA, 22 nt, synthetic construct
  source 1..22: mol_type = other RNA
cccaagatggaggttataagat

SEQ ID NO: 15714 - RNA, 22 nt, synthetic construct
  source 1..22: mol_type = other RNA
cccctggggacccccctccctc

SEQ ID NO: 15715 - RNA, 22 nt, synthetic construct
  source 1..22: mol_type = other RNA
gggtgagggttacccctgggga

SEQ ID NO: 15716 - RNA, 22 nt, synthetic construct
  source 1..22: mol_type = other RNA
agggtgagggttacccctgggg

SEQ ID NO: 15717 - RNA, 22 nt, synthetic construct
  source 1..22: mol_type = other RNA
ggtgggggacgtcttgtgctct

SEQ ID NO: 15718 - RNA, 22 nt, synthetic construct
  source 1..22: mol_type = other RNA
gagacctctccagctgccgggc

SEQ ID NO: 15719 - RNA, 22 nt, synthetic construct
  source 1..22: mol_type = other RNA
gaagcttgttggagacctctcc

SEQ ID NO: 15720 - RNA, 22 nt, synthetic construct
  source 1..22: mol_type = other RNA
ggaagcttgttggagacctctc

SEQ ID NO: 15721 - RNA, 22 nt, synthetic construct
  source 1..22: mol_type = other RNA
tggaagcttgttggagacctct

SEQ ID NO: 15722 - RNA, 22 nt, synthetic construct
  source 1..22: mol_type = other RNA
aataagtgtcaagtgaatgagc

SEQ ID NO: 15723 - RNA, 22 nt, synthetic construct
  source 1..22: mol_type = other RNA
agggagtggtggagtgaatggt

SEQ ID NO: 15724 - RNA, 22 nt, synthetic construct
  source 1..22: mol_type = other RNA
gagggagtggtggagtgaatgg

SEQ ID NO: 15725 - RNA, 22 nt, synthetic construct
  source 1..22: mol_type = other RNA
tttgagggagtggtggagtgaa

SEQ ID NO: 15726 - RNA, 22 nt, synthetic construct
  source 1..22: mol_type = other RNA
aagggcaataaatattatttga

SEQ ID NO: 15727 - RNA, 22 nt, synthetic construct
  source 1..22: mol_type = other RNA
acacccagtgcaggcttattga

SEQ ID NO: 15728 - RNA, 22 nt, synthetic construct
  source 1..22: mol_type = other RNA
tctcagcctgacaatgaagtgt

SEQ ID NO: 15729 - RNA, 22 nt, synthetic construct
  source 1..22: mol_type = other RNA
attctctcagcctgacaatgaa

SEQ ID NO: 15730 - RNA, 22 nt, synthetic construct
  source 1..22: mol_type = other RNA
gcttgcccctcattcattctct

SEQ ID NO: 15731 - RNA, 22 nt, synthetic construct
  source 1..22: mol_type = other RNA
ctcccatcctcatcaacttctc

SEQ ID NO: 15732 - RNA, 22 nt, synthetic construct
  source 1..22: mol_type = other RNA
cattgctcccatcctcatcaac

SEQ ID NO: 15733 - RNA, 22 nt, synthetic construct
  source 1..22: mol_type = other RNA
ccactttccattgctcccatcc

SEQ ID NO: 15734 - RNA, 22 nt, synthetic construct
  source 1..22: mol_type = other RNA
ttcccactttccattgctccca

SEQ ID NO: 15735 - RNA, 22 nt, synthetic construct
  source 1..22: mol_type = other RNA
attcccactttccattgctccc

SEQ ID NO: 15736 - RNA, 22 nt, synthetic construct
  source 1..22: mol_type = other RNA
actggtttattcccactttcca

SEQ ID NO: 15737 - RNA, 22 nt, synthetic construct
  source 1..22: mol_type = other RNA
tcttattcactggtttattccc

SEQ ID NO: 15738 - RNA, 22 nt, synthetic construct
  source 1..22: mol_type = other RNA
gtaattctcttattcactggtt

SEQ ID NO: 15739 - RNA, 22 nt, synthetic construct
  source 1..22: mol_type = other RNA
agtaattctcttattcactggt

SEQ ID NO: 15740 - RNA, 22 nt, synthetic construct
  source 1..22: mol_type = other RNA
gtaatttagtaattctcttatt

SEQ ID NO: 15741 - RNA, 22 nt, synthetic construct
  source 1..22: mol_type = other RNA
agtaatttagtaattctcttat

SEQ ID NO: 15742 - RNA, 22 nt, synthetic construct
  source 1..22: mol_type = other RNA
gcatacctaacatgcttagacc

SEQ ID NO: 15743 - RNA, 22 nt, synthetic construct
  source 1..22: mol_type = other RNA
agcatacctaacatgcttagac

SEQ ID NO: 15744 - RNA, 22 nt, synthetic construct
  source 1..22: mol_type = other RNA
atgatttagcatacctaacatg

SEQ ID NO: 15745 - RNA, 22 nt, synthetic construct
  source 1..22: mol_type = other RNA
tgtgagatgttaatgatttagc

SEQ ID NO: 15746 - RNA, 22 nt, synthetic construct
  source 1..22: mol_type = other RNA
ggattgtgtgagatgttaatga

SEQ ID NO: 15747 - RNA, 22 nt, synthetic construct
  source 1..22: mol_type = other RNA
tgagcatgctatacatcccacc

SEQ ID NO: 15748 - RNA, 22 nt, synthetic construct
  source 1..22: mol_type = other RNA
taccacttgctggagcaattct

SEQ ID NO: 15749 - RNA, 22 nt, synthetic construct
  source 1..22: mol_type = other RNA
aaatcccggttctaccacttgc

SEQ ID NO: 15750 - RNA, 22 nt, synthetic construct
  source 1..22: mol_type = other RNA
agacagtggagcccacgtgtct

SEQ ID NO: 15751 - RNA, 22 nt, synthetic construct
  source 1..22: mol_type = other RNA
agagttaagacagtggagccca

SEQ ID NO: 15752 - RNA, 22 nt, synthetic construct
  source 1..22: mol_type = other RNA
ttcgcttgatcactactcactc

SEQ ID NO: 15753 - RNA, 22 nt, synthetic construct
  source 1..22: mol_type = other RNA
cttcgcttgatcactactcact

SEQ ID NO: 15754 - RNA, 22 nt, synthetic construct
  source 1..22: mol_type = other RNA
tcttcgcttgatcactactcac

SEQ ID NO: 15755 - RNA, 22 nt, synthetic construct
  source 1..22: mol_type = other RNA
ctcactaagctttttcttcgct

SEQ ID NO: 15756 - RNA, 22 nt, synthetic construct
  source 1..22: mol_type = other RNA
actcactaagctttttcttcgc

SEQ ID NO: 15757 - RNA, 22 nt, synthetic construct
  source 1..22: mol_type = other RNA
cttcatttactcactaagcttt

SEQ ID NO: 15758 - RNA, 22 nt, synthetic construct
  source 1..22: mol_type = other RNA
tcattccttcatttactcacta

SEQ ID NO: 15759 - RNA, 22 nt, synthetic construct
  source 1..22: mol_type = other RNA
ctcattccttcatttactcact

SEQ ID NO: 15760 - RNA, 22 nt, synthetic construct
  source 1..22: mol_type = other RNA
caggcataaggcaccatgcatg

SEQ ID NO: 15761 - RNA, 22 nt, synthetic construct
  source 1..22: mol_type = other RNA
gccaggctggtctcgaactcct

SEQ ID NO: 15762 - RNA, 22 nt, synthetic construct
  source 1..22: mol_type = other RNA
actatgttggccaggctggtct

SEQ ID NO: 15763 - RNA, 22 nt, synthetic construct
  source 1..22: mol_type = other RNA
cactatgttggccaggctggtc

SEQ ID NO: 15764 - RNA, 22 nt, synthetic construct
  source 1..22: mol_type = other RNA
atggagacggggtttcactatg

SEQ ID NO: 15765 - RNA, 22 nt, synthetic construct
  source 1..22: mol_type = other RNA
aatggagacggggtttcactat

SEQ ID NO: 15766 - RNA, 22 nt, synthetic construct
  source 1..22: mol_type = other RNA
taatggagacggggtttcacta

SEQ ID NO: 15767 - RNA, 22 nt, synthetic construct
  source 1..22: mol_type = other RNA
ttaatggagacggggtttcact

SEQ ID NO: 15768 - RNA, 22 nt, synthetic construct
  source 1..22: mol_type = other RNA
tttaatggagacggggtttcac

SEQ ID NO: 15769 - RNA, 22 nt, synthetic construct
  source 1..22: mol_type = other RNA
tattttttaatggagacggggt

SEQ ID NO: 15770 - RNA, 22 nt, synthetic construct
  source 1..22: mol_type = other RNA
gtattttttaatggagacgggg

SEQ ID NO: 15771 - RNA, 22 nt, synthetic construct
  source 1..22: mol_type = other RNA
tgtattttttaatggagacggg

SEQ ID NO: 15772 - RNA, 22 nt, synthetic construct
  source 1..22: mol_type = other RNA
ttgtattttttaatggagacgg

SEQ ID NO: 15773 - RNA, 22 nt, synthetic construct
  source 1..22: mol_type = other RNA
caggcacccactaccacgtctg

SEQ ID NO: 15774 - RNA, 22 nt, synthetic construct
  source 1..22: mol_type = other RNA
tcctgcctcggcctgccaagta

SEQ ID NO: 15775 - RNA, 22 nt, synthetic construct
  source 1..22: mol_type = other RNA
ggcgattctcctgcctcggcct

SEQ ID NO: 15776 - RNA, 22 nt, synthetic construct
  source 1..22: mol_type = other RNA
aggcgattctcctgcctcggcc

SEQ ID NO: 15777 - RNA, 22 nt, synthetic construct
  source 1..22: mol_type = other RNA
agatggatcctgccctgtgccc

SEQ ID NO: 15778 - RNA, 22 nt, synthetic construct
  source 1..22: mol_type = other RNA
gagatggatcctgccctgtgcc

SEQ ID NO: 15779 - RNA, 22 nt, synthetic construct
  source 1..22: mol_type = other RNA
tgagatggatcctgccctgtgc

SEQ ID NO: 15780 - RNA, 22 nt, synthetic construct
  source 1..22: mol_type = other RNA
ttgagatggatcctgccctgtg

SEQ ID NO: 15781 - RNA, 22 nt, synthetic construct
  source 1..22: mol_type = other RNA
tttgagatggatcctgccctgt

SEQ ID NO: 15782 - RNA, 22 nt, synthetic construct
  source 1..22: mol_type = other RNA
ttttgagatggatcctgccctg

SEQ ID NO: 15783 - RNA, 22 nt, synthetic construct
  source 1..22: mol_type = other RNA
tttttgagatggatcctgccct

SEQ ID NO: 15784 - RNA, 22 nt, synthetic construct
  source 1..22: mol_type = other RNA
ttttttgagatggatcctgccc

SEQ ID NO: 15785 - RNA, 22 nt, synthetic construct
  source 1..22: mol_type = other RNA
tttttttgagatggatcctgcc

SEQ ID NO: 15786 - RNA, 22 nt, synthetic construct
  source 1..22: mol_type = other RNA
ttttttttgagatggatcctgc

SEQ ID NO: 15787 - RNA, 22 nt, synthetic construct
  source 1..22: mol_type = other RNA
tctcttttttttttttgagatg

SEQ ID NO: 15788 - RNA, 22 nt, synthetic construct
  source 1..22: mol_type = other RNA
ctctcttttttttttttgagat

SEQ ID NO: 15789 - RNA, 22 nt, synthetic construct
  source 1..22: mol_type = other RNA
gaccttttctctcttttttttt

SEQ ID NO: 15790 - RNA, 22 nt, synthetic construct
  source 1..22: mol_type = other RNA
agaccttttctctctttttttt

SEQ ID NO: 15791 - RNA, 22 nt, synthetic construct
  source 1..22: mol_type = other RNA
agtgtccactccttttagacct

SEQ ID NO: 15792 - RNA, 22 nt, synthetic construct
  source 1..22: mol_type = other RNA
aagtgtccactccttttagacc

SEQ ID NO: 15793 - RNA, 22 nt, synthetic construct
  source 1..22: mol_type = other RNA
cttcactcatcgtctctcttgt

SEQ ID NO: 15794 - RNA, 22 nt, synthetic construct
  source 1..22: mol_type = other RNA
cacacccattccttcactcatc

SEQ ID NO: 15795 - RNA, 22 nt, synthetic construct
  source 1..22: mol_type = other RNA
ccacacccattccttcactcat

SEQ ID NO: 15796 - RNA, 22 nt, synthetic construct
  source 1..22: mol_type = other RNA
actcatttccacacccattcct

SEQ ID NO: 15797 - RNA, 22 nt, synthetic construct
  source 1..22: mol_type = other RNA
gttcactcatttccacacccat

SEQ ID NO: 15798 - RNA, 22 nt, synthetic construct
  source 1..22: mol_type = other RNA
attagttcactcatttccacac

SEQ ID NO: 15799 - RNA, 22 nt, synthetic construct
  source 1..22: mol_type = other RNA
agtcacccaccactcattcatt

SEQ ID NO: 15800 - RNA, 22 nt, synthetic construct
  source 1..22: mol_type = other RNA
cttcattcagtcacccaccact

SEQ ID NO: 15801 - RNA, 22 nt, synthetic construct
  source 1..22: mol_type = other RNA
gcttcattcagtcacccaccac

SEQ ID NO: 15802 - RNA, 22 nt, synthetic construct
  source 1..22: mol_type = other RNA
caggtgtgagccaccacatctg

SEQ ID NO: 15803 - RNA, 22 nt, synthetic construct
  source 1..22: mol_type = other RNA
cgccttggcctcccaaagtgct

SEQ ID NO: 15804 - RNA, 22 nt, synthetic construct
  source 1..22: mol_type = other RNA
cccaggctggtcttgagctcct

SEQ ID NO: 15805 - RNA, 22 nt, synthetic construct
  source 1..22: mol_type = other RNA
gcccaggctggtcttgagctcc

SEQ ID NO: 15806 - RNA, 22 nt, synthetic construct
  source 1..22: mol_type = other RNA
tgcccaggctggtcttgagctc

SEQ ID NO: 15807 - RNA, 22 nt, synthetic construct
  source 1..22: mol_type = other RNA
tcactattttgcccaggctggt

SEQ ID NO: 15808 - RNA, 22 nt, synthetic construct
  source 1..22: mol_type = other RNA
tggagataagttctcactattt

SEQ ID NO: 15809 - RNA, 22 nt, synthetic construct
  source 1..22: mol_type = other RNA
gtggagataagttctcactatt

SEQ ID NO: 15810 - RNA, 22 nt, synthetic construct
  source 1..22: mol_type = other RNA
tgtggagataagttctcactat

SEQ ID NO: 15811 - RNA, 22 nt, synthetic construct
  source 1..22: mol_type = other RNA
ttgtggagataagttctcacta

SEQ ID NO: 15812 - RNA, 22 nt, synthetic construct
  source 1..22: mol_type = other RNA
tttgtggagataagttctcact

SEQ ID NO: 15813 - RNA, 22 nt, synthetic construct
  source 1..22: mol_type = other RNA
ttttgtggagataagttctcac

SEQ ID NO: 15814 - RNA, 22 nt, synthetic construct
  source 1..22: mol_type = other RNA
tttttttgtggagataagttct

SEQ ID NO: 15815 - RNA, 22 nt, synthetic construct
  source 1..22: mol_type = other RNA
gtttttttgtggagataagttc

SEQ ID NO: 15816 - RNA, 22 nt, synthetic construct
  source 1..22: mol_type = other RNA
tgtttttttgtggagataagtt

SEQ ID NO: 15817 - RNA, 22 nt, synthetic construct
  source 1..22: mol_type = other RNA
ttgtttttttgtggagataagt

SEQ ID NO: 15818 - RNA, 22 nt, synthetic construct
  source 1..22: mol_type = other RNA
ttttttgtttttttgtggagat

SEQ ID NO: 15819 - RNA, 22 nt, synthetic construct
  source 1..22: mol_type = other RNA
cttttttgtttttttgtggaga

SEQ ID NO: 15820 - RNA, 22 nt, synthetic construct
  source 1..22: mol_type = other RNA
tcttttttgtttttttgtggag

SEQ ID NO: 15821 - RNA, 22 nt, synthetic construct
  source 1..22: mol_type = other RNA
ttcttttttgtttttttgtgga

SEQ ID NO: 15822 - RNA, 22 nt, synthetic construct
  source 1..22: mol_type = other RNA
tagagatggggtctcactatgt

SEQ ID NO: 15823 - RNA, 22 nt, synthetic construct
  source 1..22: mol_type = other RNA
gtagagatggggtctcactatg

SEQ ID NO: 15824 - RNA, 22 nt, synthetic construct
  source 1..22: mol_type = other RNA
tgtagagatggggtctcactat

SEQ ID NO: 15825 - RNA, 22 nt, synthetic construct
  source 1..22: mol_type = other RNA
ttgtagagatggggtctcacta

SEQ ID NO: 15826 - RNA, 22 nt, synthetic construct
  source 1..22: mol_type = other RNA
tttgtagagatggggtctcact

SEQ ID NO: 15827 - RNA, 22 nt, synthetic construct
  source 1..22: mol_type = other RNA
ttttgtagagatggggtctcac

SEQ ID NO: 15828 - RNA, 22 nt, synthetic construct
  source 1..22: mol_type = other RNA
atttttttgtagagatggggtc

SEQ ID NO: 15829 - RNA, 22 nt, synthetic construct
  source 1..22: mol_type = other RNA
gatttttttgtagagatggggt

SEQ ID NO: 15830 - RNA, 22 nt, synthetic construct
  source 1..22: mol_type = other RNA
tgatttttttgtagagatgggg

SEQ ID NO: 15831 - RNA, 22 nt, synthetic construct
  source 1..22: mol_type = other RNA
ttgatttttttgtagagatggg

SEQ ID NO: 15832 - RNA, 22 nt, synthetic construct
  source 1..22: mol_type = other RNA
tttgatttttttgtagagatgg

SEQ ID NO: 15833 - RNA, 22 nt, synthetic construct
  source 1..22: mol_type = other RNA
cccaggctggaatgcagtggtg

SEQ ID NO: 15834 - RNA, 22 nt, synthetic construct
  source 1..22: mol_type = other RNA
gcccaggctggaatgcagtggt

SEQ ID NO: 15835 - RNA, 22 nt, synthetic construct
  source 1..22: mol_type = other RNA
tgcccaggctggaatgcagtgg

SEQ ID NO: 15836 - RNA, 22 nt, synthetic construct
  source 1..22: mol_type = other RNA
ttgcccaggctggaatgcagtg

SEQ ID NO: 15837 - RNA, 22 nt, synthetic construct
  source 1..22: mol_type = other RNA
agacagggtctggcttttttgc

SEQ ID NO: 15838 - RNA, 22 nt, synthetic construct
  source 1..22: mol_type = other RNA
gagacagggtctggcttttttg

SEQ ID NO: 15839 - RNA, 22 nt, synthetic construct
  source 1..22: mol_type = other RNA
tgagacagggtctggctttttt

SEQ ID NO: 15840 - RNA, 22 nt, synthetic construct
  source 1..22: mol_type = other RNA
ttttgagacagggtctggcttt

SEQ ID NO: 15841 - RNA, 22 nt, synthetic construct
  source 1..22: mol_type = other RNA
gttttgagacagggtctggctt

SEQ ID NO: 15842 - RNA, 22 nt, synthetic construct
  source 1..22: mol_type = other RNA
tgttttgagacagggtctggct

SEQ ID NO: 15843 - RNA, 22 nt, synthetic construct
  source 1..22: mol_type = other RNA
ttttgttttgagacagggtctg

SEQ ID NO: 15844 - RNA, 22 nt, synthetic construct
  source 1..22: mol_type = other RNA
gttttgttttgagacagggtct

SEQ ID NO: 15845 - RNA, 22 nt, synthetic construct
  source 1..22: mol_type = other RNA
tgttttgttttgagacagggtc

SEQ ID NO: 15846 - RNA, 22 nt, synthetic construct
  source 1..22: mol_type = other RNA
ttttgttttgttttgagacagg

SEQ ID NO: 15847 - RNA, 22 nt, synthetic construct
  source 1..22: mol_type = other RNA
gttttgttttgttttgagacag

SEQ ID NO: 15848 - RNA, 22 nt, synthetic construct
  source 1..22: mol_type = other RNA
tttgttttgttttgttttgaga

SEQ ID NO: 15849 - RNA, 22 nt, synthetic construct
  source 1..22: mol_type = other RNA
gtttgttttgttttgttttgag

SEQ ID NO: 15850 - RNA, 22 nt, synthetic construct
  source 1..22: mol_type = other RNA
gtttgtttgttttgttttgttt

SEQ ID NO: 15851 - RNA, 22 nt, synthetic construct
  source 1..22: mol_type = other RNA
tgtttgtttgttttgttttgtt

SEQ ID NO: 15852 - RNA, 22 nt, synthetic construct
  source 1..22: mol_type = other RNA
ttgtttgtttgttttgttttgt

SEQ ID NO: 15853 - RNA, 22 nt, synthetic construct
  source 1..22: mol_type = other RNA
tttgtttgtttgttttgttttg

SEQ ID NO: 15854 - RNA, 22 nt, synthetic construct
  source 1..22: mol_type = other RNA
cccacacagtttttttgtttgt

SEQ ID NO: 15855 - RNA, 22 nt, synthetic construct
  source 1..22: mol_type = other RNA
catctgttccccacacagtttt

SEQ ID NO: 15856 - RNA, 22 nt, synthetic construct
  source 1..22: mol_type = other RNA
acatctgttccccacacagttt

SEQ ID NO: 15857 - RNA, 22 nt, synthetic construct
  source 1..22: mol_type = other RNA
ccgctccaggctcttgctgctg

SEQ ID NO: 15858 - RNA, 22 nt, synthetic construct
  source 1..22: mol_type = other RNA
tgcccagtccggggtggccagt

SEQ ID NO: 15859 - RNA, 22 nt, synthetic construct
  source 1..22: mol_type = other RNA
cccagcacagcaatcactcgtg

SEQ ID NO: 15860 - RNA, 22 nt, synthetic construct
  source 1..22: mol_type = other RNA
aagcaatggcaggggacagaga

SEQ ID NO: 15861 - RNA, 22 nt, synthetic construct
  source 1..22: mol_type = other RNA
atgtctgcggcccagctcccag

SEQ ID NO: 15862 - RNA, 22 nt, synthetic construct
  source 1..22: mol_type = other RNA
gccatcgcccaggtcctcacgt

SEQ ID NO: 15863 - RNA, 22 nt, synthetic construct
  source 1..22: mol_type = other RNA
gactaagcctttggccatcgcc

SEQ ID NO: 15864 - RNA, 22 nt, synthetic construct
  source 1..22: mol_type = other RNA
caggaggaagctggggaaggcc

SEQ ID NO: 15865 - RNA, 22 nt, synthetic construct
  source 1..22: mol_type = other RNA
gccactcagagccagccacagg

SEQ ID NO: 15866 - RNA, 22 nt, synthetic construct
  source 1..22: mol_type = other RNA
cgccactcagagccagccacag

SEQ ID NO: 15867 - RNA, 22 nt, synthetic construct
  source 1..22: mol_type = other RNA
tcatagggcctcttcttccttg

SEQ ID NO: 15868 - RNA, 22 nt, synthetic construct
  source 1..22: mol_type = other RNA
cagcctcctcggcctcgtgggc

SEQ ID NO: 15869 - RNA, 22 nt, synthetic construct
  source 1..22: mol_type = other RNA
atgcccaacacaaggatgtctc

SEQ ID NO: 15870 - RNA, 22 nt, synthetic construct
  source 1..22: mol_type = other RNA
tgccccacccggctgctctgca

SEQ ID NO: 15871 - RNA, 22 nt, synthetic construct
  source 1..22: mol_type = other RNA
cctctcacttgctgtgtggcaa

SEQ ID NO: 15872 - RNA, 22 nt, synthetic construct
  source 1..22: mol_type = other RNA
actgggagaatgccattgcctc

SEQ ID NO: 15873 - RNA, 22 nt, synthetic construct
  source 1..22: mol_type = other RNA
tagacataccccagtgactggc

SEQ ID NO: 15874 - RNA, 22 nt, synthetic construct
  source 1..22: mol_type = other RNA
agcccaggtcagtctcagattc

SEQ ID NO: 15875 - RNA, 22 nt, synthetic construct
  source 1..22: mol_type = other RNA
gagcccaggtcagtctcagatt

SEQ ID NO: 15876 - RNA, 22 nt, synthetic construct
  source 1..22: mol_type = other RNA
ctcttagcataagaaaacggtg

SEQ ID NO: 15877 - RNA, 22 nt, synthetic construct
  source 1..22: mol_type = other RNA
ctgaatacaaaatggagtggaa

SEQ ID NO: 15878 - RNA, 22 nt, synthetic construct
  source 1..22: mol_type = other RNA
gtctggttgctgaatacaaaat

SEQ ID NO: 15879 - RNA, 22 nt, synthetic construct
  source 1..22: mol_type = other RNA
tgagaagattggtctggttgct

SEQ ID NO: 15880 - RNA, 22 nt, synthetic construct
  source 1..22: mol_type = other RNA
aagttctgagaagattggtctg

SEQ ID NO: 15881 - RNA, 22 nt, synthetic construct
  source 1..22: mol_type = other RNA
taagcagggatgggatacaatc

SEQ ID NO: 15882 - RNA, 22 nt, synthetic construct
  source 1..22: mol_type = other RNA
gccttcatcctgacagtggtgg

SEQ ID NO: 15883 - RNA, 22 nt, synthetic construct
  source 1..22: mol_type = other RNA
agccttcatcctgacagtggtg

SEQ ID NO: 15884 - RNA, 22 nt, synthetic construct
  source 1..22: mol_type = other RNA
aggaatttagccttcatcctga

SEQ ID NO: 15885 - RNA, 22 nt, synthetic construct
  source 1..22: mol_type = other RNA
cagaccgacttaatgaaaccaa

SEQ ID NO: 15886 - RNA, 22 nt, synthetic construct
  source 1..22: mol_type = other RNA
agctgaaatgctcaagcagatt

SEQ ID NO: 15887 - RNA, 22 nt, synthetic construct
  source 1..22: mol_type = other RNA
gggggaaatatggaagcaatcc

SEQ ID NO: 15888 - RNA, 22 nt, synthetic construct
  source 1..22: mol_type = other RNA
agggggaaatatggaagcaatc

SEQ ID NO: 15889 - RNA, 22 nt, synthetic construct
  source 1..22: mol_type = other RNA
tgtaggaccttacagcttgggt

SEQ ID NO: 15890 - RNA, 22 nt, synthetic construct
  source 1..22: mol_type = other RNA
gcacaattatgtaggaccttac

SEQ ID NO: 15891 - RNA, 22 nt, synthetic construct
  source 1..22: mol_type = other RNA
ttggcacaattatgtaggacct

SEQ ID NO: 15892 - RNA, 22 nt, synthetic construct
  source 1..22: mol_type = other RNA
cttcggctaccaggaagctcac

SEQ ID NO: 15893 - RNA, 22 nt, synthetic construct
  source 1..22: mol_type = other RNA
gcttcggctaccaggaagctca

SEQ ID NO: 15894 - RNA, 22 nt, synthetic construct
  source 1..22: mol_type = other RNA
tgcttcggctaccaggaagctc

SEQ ID NO: 15895 - RNA, 22 nt, synthetic construct
  source 1..22: mol_type = other RNA
cctttttgcttcggctaccagg

SEQ ID NO: 15896 - RNA, 22 nt, synthetic construct
  source 1..22: mol_type = other RNA
tttccctttttgcttcggctac

SEQ ID NO: 15897 - RNA, 22 nt, synthetic construct
  source 1..22: mol_type = other RNA
ctttccctttttgcttcggcta

SEQ ID NO: 15898 - RNA, 22 nt, synthetic construct
  source 1..22: mol_type = other RNA
tctttccctttttgcttcggct

SEQ ID NO: 15899 - RNA, 22 nt, synthetic construct
  source 1..22: mol_type = other RNA
tcacaactcacacagtggtttt

SEQ ID NO: 15900 - RNA, 22 nt, synthetic construct
  source 1..22: mol_type = other RNA
ctactttctcacaactcacaca

SEQ ID NO: 15901 - RNA, 22 nt, synthetic construct
  source 1..22: mol_type = other RNA
attcctactttctcacaactca

SEQ ID NO: 15902 - RNA, 22 nt, synthetic construct
  source 1..22: mol_type = other RNA
ttgattcctactttctcacaac

SEQ ID NO: 15903 - RNA, 22 nt, synthetic construct
  source 1..22: mol_type = other RNA
ccagaaagccttccatgaccac

SEQ ID NO: 15904 - RNA, 22 nt, synthetic construct
  source 1..22: mol_type = other RNA
cttagctcaacctctacctttc

SEQ ID NO: 15905 - RNA, 22 nt, synthetic construct
  source 1..22: mol_type = other RNA
tttccttagctcaacctctacc

SEQ ID NO: 15906 - RNA, 22 nt, synthetic construct
  source 1..22: mol_type = other RNA
aaatactttctttccttagctc

SEQ ID NO: 15907 - RNA, 22 nt, synthetic construct
  source 1..22: mol_type = other RNA
aaaggctcgatggtgaacttct

SEQ ID NO: 15908 - RNA, 22 nt, synthetic construct
  source 1..22: mol_type = other RNA
ccaggtcttccacatccttcag

SEQ ID NO: 15909 - RNA, 22 nt, synthetic construct
  source 1..22: mol_type = other RNA
cccagaaagagggcatggggtg

SEQ ID NO: 15910 - RNA, 22 nt, synthetic construct
  source 1..22: mol_type = other RNA
gccattgcccagaaagagggca

SEQ ID NO: 15911 - RNA, 22 nt, synthetic construct
  source 1..22: mol_type = other RNA
tagaggctccgcctgggcagcg

SEQ ID NO: 15912 - RNA, 22 nt, synthetic construct
  source 1..22: mol_type = other RNA
aattctagaggctccgcctggg

SEQ ID NO: 15913 - RNA, 22 nt, synthetic construct
  source 1..22: mol_type = other RNA
caattctagaggctccgcctgg

SEQ ID NO: 15914 - RNA, 22 nt, synthetic construct
  source 1..22: mol_type = other RNA
tcaattctagaggctccgcctg

SEQ ID NO: 15915 - RNA, 22 nt, synthetic construct
  source 1..22: mol_type = other RNA
aatgcagcaaagttttcaattc

SEQ ID NO: 15916 - RNA, 22 nt, synthetic construct
  source 1..22: mol_type = other RNA
gaatgcagcaaagttttcaatt

SEQ ID NO: 15917 - RNA, 22 nt, synthetic construct
  source 1..22: mol_type = other RNA
tgaatgcagcaaagttttcaat

SEQ ID NO: 15918 - RNA, 22 nt, synthetic construct
  source 1..22: mol_type = other RNA
gctaagacttgggcacatgatg

SEQ ID NO: 15919 - RNA, 22 nt, synthetic construct
  source 1..22: mol_type = other RNA
tccatggctttagctaagactt

SEQ ID NO: 15920 - RNA, 22 nt, synthetic construct
  source 1..22: mol_type = other RNA
actcctagaaggggagaggttc

SEQ ID NO: 15921 - RNA, 22 nt, synthetic construct
  source 1..22: mol_type = other RNA
tcctaaatgcctcaaagggtgg

SEQ ID NO: 15922 - RNA, 22 nt, synthetic construct
  source 1..22: mol_type = other RNA
ggacaacagttgtcctaaatgc

SEQ ID NO: 15923 - RNA, 22 nt, synthetic construct
  source 1..22: mol_type = other RNA
gggacaacagttgtcctaaatg

SEQ ID NO: 15924 - RNA, 22 nt, synthetic construct
  source 1..22: mol_type = other RNA
tctgccttctggaccttagctc

SEQ ID NO: 15925 - RNA, 22 nt, synthetic construct
  source 1..22: mol_type = other RNA
gtctgccttctggaccttagct

SEQ ID NO: 15926 - RNA, 22 nt, synthetic construct
  source 1..22: mol_type = other RNA
tgtctgccttctggaccttagc

SEQ ID NO: 15927 - RNA, 22 nt, synthetic construct
  source 1..22: mol_type = other RNA
tgtaatcaagttttgtctgcct

SEQ ID NO: 15928 - RNA, 22 nt, synthetic construct
  source 1..22: mol_type = other RNA
acttgttctgtaatcaagtttt

SEQ ID NO: 15929 - RNA, 22 nt, synthetic construct
  source 1..22: mol_type = other RNA
ggcacttaccagtacctatccc

SEQ ID NO: 15930 - RNA, 22 nt, synthetic construct
  source 1..22: mol_type = other RNA
atggaaatgagcctcagattag

SEQ ID NO: 15931 - RNA, 22 nt, synthetic construct
  source 1..22: mol_type = other RNA
agaaataataaaaataaaaata

SEQ ID NO: 15932 - RNA, 22 nt, synthetic construct
  source 1..22: mol_type = other RNA
tagcctggtagacacagcgaga

SEQ ID NO: 15933 - RNA, 22 nt, synthetic construct
  source 1..22: mol_type = other RNA
cgaagctacagtaagctatgat

SEQ ID NO: 15934 - RNA, 22 nt, synthetic construct
  source 1..22: mol_type = other RNA
aagaccagcctgggcaacatag

SEQ ID NO: 15935 - RNA, 22 nt, synthetic construct
  source 1..22: mol_type = other RNA
cttgaggccaggagttcaagac

SEQ ID NO: 15936 - RNA, 22 nt, synthetic construct
  source 1..22: mol_type = other RNA
ggaggctgaggcaggaggattg

SEQ ID NO: 15937 - RNA, 22 nt, synthetic construct
  source 1..22: mol_type = other RNA
tccccctcttaaaaaaaaagat

SEQ ID NO: 15938 - RNA, 22 nt, synthetic construct
  source 1..22: mol_type = other RNA
cttggggcaactgttgtccccc

SEQ ID NO: 15939 - RNA, 22 nt, synthetic construct
  source 1..22: mol_type = other RNA
ctttccttggggcaactgttgt

SEQ ID NO: 15940 - RNA, 22 nt, synthetic construct
  source 1..22: mol_type = other RNA
cccagggggattgctttccttg

SEQ ID NO: 15941 - RNA, 22 nt, synthetic construct
  source 1..22: mol_type = other RNA
gggggagcaggcactgctgtca

SEQ ID NO: 15942 - RNA, 22 nt, synthetic construct
  source 1..22: mol_type = other RNA
ggtcccgaacagcagggagctc

SEQ ID NO: 15943 - RNA, 22 nt, synthetic construct
  source 1..22: mol_type = other RNA
tttaggtcccgaacagcaggga

SEQ ID NO: 15944 - RNA, 22 nt, synthetic construct
  source 1..22: mol_type = other RNA
ctttaggtcccgaacagcaggg

SEQ ID NO: 15945 - RNA, 22 nt, synthetic construct
  source 1..22: mol_type = other RNA
cttacgcaaactccagtttctt

SEQ ID NO: 15946 - RNA, 22 nt, synthetic construct
  source 1..22: mol_type = other RNA
aggtggtacaagcccagctaat

SEQ ID NO: 15947 - RNA, 22 nt, synthetic construct
  source 1..22: mol_type = other RNA
tggagatctatctccattcagg

SEQ ID NO: 15948 - RNA, 22 nt, synthetic construct
  source 1..22: mol_type = other RNA
caaagtggtgggcaagagggta

SEQ ID NO: 15949 - RNA, 22 nt, synthetic construct
  source 1..22: mol_type = other RNA
ccaaagtggtgggcaagagggt

SEQ ID NO: 15950 - RNA, 22 nt, synthetic construct
  source 1..22: mol_type = other RNA
cagctgctggaagctatttcca

SEQ ID NO: 15951 - RNA, 22 nt, synthetic construct
  source 1..22: mol_type = other RNA
cccacactggtcactttccagc

SEQ ID NO: 15952 - RNA, 22 nt, synthetic construct
  source 1..22: mol_type = other RNA
gcccacactggtcactttccag

SEQ ID NO: 15953 - RNA, 22 nt, synthetic construct
  source 1..22: mol_type = other RNA
gcttcaaatctgagaacctcca

SEQ ID NO: 15954 - RNA, 22 nt, synthetic construct
  source 1..22: mol_type = other RNA
accagcaaacgggtccattagc

SEQ ID NO: 15955 - RNA, 22 nt, synthetic construct
  source 1..22: mol_type = other RNA
aatgagtgatgggaatgaccat

SEQ ID NO: 15956 - RNA, 22 nt, synthetic construct
  source 1..22: mol_type = other RNA
aagtgctcaatacctctgttga

SEQ ID NO: 15957 - RNA, 22 nt, synthetic construct
  source 1..22: mol_type = other RNA
gactgtcagctcatgaggacag

SEQ ID NO: 15958 - RNA, 22 nt, synthetic construct
  source 1..22: mol_type = other RNA
attagactgtcagctcatgagg

SEQ ID NO: 15959 - RNA, 22 nt, synthetic construct
  source 1..22: mol_type = other RNA
cttatcctcactgaagcttcag

SEQ ID NO: 15960 - RNA, 22 nt, synthetic construct
  source 1..22: mol_type = other RNA
ttactcccctctccccactcag

SEQ ID NO: 15961 - RNA, 22 nt, synthetic construct
  source 1..22: mol_type = other RNA
ctggaaagcctttcttactccc

SEQ ID NO: 15962 - RNA, 22 nt, synthetic construct
  source 1..22: mol_type = other RNA
caattcctggaaagcctttctt

SEQ ID NO: 15963 - RNA, 22 nt, synthetic construct
  source 1..22: mol_type = other RNA
tgatccctggcgaaattacaat

SEQ ID NO: 15964 - RNA, 22 nt, synthetic construct
  source 1..22: mol_type = other RNA
ctgatccctggcgaaattacaa

SEQ ID NO: 15965 - RNA, 22 nt, synthetic construct
  source 1..22: mol_type = other RNA
ggccttttctgatccctggcga

SEQ ID NO: 15966 - RNA, 22 nt, synthetic construct
  source 1..22: mol_type = other RNA
gggacacattgggccttttctg

SEQ ID NO: 15967 - RNA, 22 nt, synthetic construct
  source 1..22: mol_type = other RNA
ctggccacaggagggaaaagga

SEQ ID NO: 15968 - RNA, 22 nt, synthetic construct
  source 1..22: mol_type = other RNA
tgcagttcctggccacaggagg

SEQ ID NO: 15969 - RNA, 22 nt, synthetic construct
  source 1..22: mol_type = other RNA
tccctggggaggccatcccttg

SEQ ID NO: 15970 - RNA, 22 nt, synthetic construct
  source 1..22: mol_type = other RNA
aaaatgggggaaagattctccc

SEQ ID NO: 15971 - RNA, 22 nt, synthetic construct
  source 1..22: mol_type = other RNA
caaaatgggggaaagattctcc

SEQ ID NO: 15972 - RNA, 22 nt, synthetic construct
  source 1..22: mol_type = other RNA
atcctagctgcacatcaaaagc

SEQ ID NO: 15973 - RNA, 22 nt, synthetic construct
  source 1..22: mol_type = other RNA
catcctagctgcacatcaaaag

SEQ ID NO: 15974 - RNA, 22 nt, synthetic construct
  source 1..22: mol_type = other RNA
tcatcctagctgcacatcaaaa

SEQ ID NO: 15975 - RNA, 22 nt, synthetic construct
  source 1..22: mol_type = other RNA
ctttttcatcctagctgcacat

SEQ ID NO: 15976 - RNA, 22 nt, synthetic construct
  source 1..22: mol_type = other RNA
aaaccaggatagtcccaggcaa

SEQ ID NO: 15977 - RNA, 22 nt, synthetic construct
  source 1..22: mol_type = other RNA
caaaccaggatagtcccaggca

SEQ ID NO: 15978 - RNA, 22 nt, synthetic construct
  source 1..22: mol_type = other RNA
tcaaaccaggatagtcccaggc

SEQ ID NO: 15979 - RNA, 22 nt, synthetic construct
  source 1..22: mol_type = other RNA
agttttcaaaccaggatagtcc

SEQ ID NO: 15980 - RNA, 22 nt, synthetic construct
  source 1..22: mol_type = other RNA
cctgggactaaggggcttcttg

SEQ ID NO: 15981 - RNA, 22 nt, synthetic construct
  source 1..22: mol_type = other RNA
gcctgggactaaggggcttctt

SEQ ID NO: 15982 - RNA, 22 nt, synthetic construct
  source 1..22: mol_type = other RNA
tgtcaccccagcaacactgcct

SEQ ID NO: 15983 - RNA, 22 nt, synthetic construct
  source 1..22: mol_type = other RNA
ctgtcaccccagcaacactgcc

SEQ ID NO: 15984 - RNA, 22 nt, synthetic construct
  source 1..22: mol_type = other RNA
ttggggcccatgtatggtgggc

SEQ ID NO: 15985 - RNA, 22 nt, synthetic construct
  source 1..22: mol_type = other RNA
tgctttcttggggcccatgtat

SEQ ID NO: 15986 - RNA, 22 nt, synthetic construct
  source 1..22: mol_type = other RNA
ttgtgctttcttggggcccatg

SEQ ID NO: 15987 - RNA, 22 nt, synthetic construct
  source 1..22: mol_type = other RNA
tgacagatctaaatataataat

SEQ ID NO: 15988 - RNA, 22 nt, synthetic construct
  source 1..22: mol_type = other RNA
tgccactgaactccagcctgag

SEQ ID NO: 15989 - RNA, 22 nt, synthetic construct
  source 1..22: mol_type = other RNA
aggctgtggtgagctgtgattg

SEQ ID NO: 15990 - RNA, 22 nt, synthetic construct
  source 1..22: mol_type = other RNA
gtcaggtggggcatgcctgtag

SEQ ID NO: 15991 - RNA, 22 nt, synthetic construct
  source 1..22: mol_type = other RNA
cttgagcccaggagctcgagac

SEQ ID NO: 15992 - RNA, 22 nt, synthetic construct
  source 1..22: mol_type = other RNA
ggaggctgaggtgggaggattg

SEQ ID NO: 15993 - RNA, 22 nt, synthetic construct
  source 1..22: mol_type = other RNA
tggccaggtgcgggagctcgca

SEQ ID NO: 15994 - RNA, 22 nt, synthetic construct
  source 1..22: mol_type = other RNA
aaagcctgttctggccaggtgc

SEQ ID NO: 15995 - RNA, 22 nt, synthetic construct
  source 1..22: mol_type = other RNA
aaaagcctgttctggccaggtg

SEQ ID NO: 15996 - RNA, 22 nt, synthetic construct
  source 1..22: mol_type = other RNA
agatggaaggtgagctgcaaat

SEQ ID NO: 15997 - RNA, 22 nt, synthetic construct
  source 1..22: mol_type = other RNA
tacaatggggagatgatgacaa

SEQ ID NO: 15998 - RNA, 22 nt, synthetic construct
  source 1..22: mol_type = other RNA
gtacaatggggagatgatgaca

SEQ ID NO: 15999 - RNA, 22 nt, synthetic construct
  source 1..22: mol_type = other RNA
ccatttgtacaatggggagatg

SEQ ID NO: 16000 - RNA, 22 nt, synthetic construct
  source 1..22: mol_type = other RNA
tcagcattgccatttgtacaat

SEQ ID NO: 16001 - RNA, 22 nt, synthetic construct
  source 1..22: mol_type = other RNA
aagtctcttgttctcagcattg

SEQ ID NO: 16002 - RNA, 22 nt, synthetic construct
  source 1..22: mol_type = other RNA
aaagtctcttgttctcagcatt

SEQ ID NO: 16003 - RNA, 22 nt, synthetic construct
  source 1..22: mol_type = other RNA
gataaacaatttaaagtctctt

SEQ ID NO: 16004 - RNA, 22 nt, synthetic construct
  source 1..22: mol_type = other RNA
tgactttggataaacaatttaa

SEQ ID NO: 16005 - RNA, 22 nt, synthetic construct
  source 1..22: mol_type = other RNA
tgtggaaggagcttagggccag

SEQ ID NO: 16006 - RNA, 22 nt, synthetic construct
  source 1..22: mol_type = other RNA
ctgtggaaggagcttagggcca

SEQ ID NO: 16007 - RNA, 22 nt, synthetic construct
  source 1..22: mol_type = other RNA
tctgtggaaggagcttagggcc

SEQ ID NO: 16008 - RNA, 22 nt, synthetic construct
  source 1..22: mol_type = other RNA
gctttttctgtggaaggagctt

SEQ ID NO: 16009 - RNA, 22 nt, synthetic construct
  source 1..22: mol_type = other RNA
agctttttctgtggaaggagct

SEQ ID NO: 16010 - RNA, 22 nt, synthetic construct
  source 1..22: mol_type = other RNA
atttagctttttctgtggaagg

SEQ ID NO: 16011 - RNA, 22 nt, synthetic construct
  source 1..22: mol_type = other RNA
gatgatctagacccctaccaag

SEQ ID NO: 16012 - RNA, 22 nt, synthetic construct
  source 1..22: mol_type = other RNA
tagcctgggtgacagagcaaga

SEQ ID NO: 16013 - RNA, 22 nt, synthetic construct
  source 1..22: mol_type = other RNA
cagtgagccaagatcataccac

SEQ ID NO: 16014 - RNA, 22 nt, synthetic construct
  source 1..22: mol_type = other RNA
cttgaaccgagaggtggagatt

SEQ ID NO: 16015 - RNA, 22 nt, synthetic construct
  source 1..22: mol_type = other RNA
gccaggtgtagtggtgtacacc

SEQ ID NO: 16016 - RNA, 22 nt, synthetic construct
  source 1..22: mol_type = other RNA
aagcccgtctctactaaaaata

SEQ ID NO: 16017 - RNA, 22 nt, synthetic construct
  source 1..22: mol_type = other RNA
aagaccagcctggccaacatgg

SEQ ID NO: 16018 - RNA, 22 nt, synthetic construct
  source 1..22: mol_type = other RNA
ggaggctgaggtgggaggaaca

SEQ ID NO: 16019 - RNA, 22 nt, synthetic construct
  source 1..22: mol_type = other RNA
taagctgggcatggtggcttac

SEQ ID NO: 16020 - RNA, 22 nt, synthetic construct
  source 1..22: mol_type = other RNA
tatataaaatgcactgaattat

SEQ ID NO: 16021 - RNA, 22 nt, synthetic construct
  source 1..22: mol_type = other RNA
atgagattatatataaaatgca

SEQ ID NO: 16022 - RNA, 22 nt, synthetic construct
  source 1..22: mol_type = other RNA
tggggcacaggggagcagtgat

SEQ ID NO: 16023 - RNA, 22 nt, synthetic construct
  source 1..22: mol_type = other RNA
ctggggcacaggggagcagtga

SEQ ID NO: 16024 - RNA, 22 nt, synthetic construct
  source 1..22: mol_type = other RNA
tctggggcacaggggagcagtg

SEQ ID NO: 16025 - RNA, 22 nt, synthetic construct
  source 1..22: mol_type = other RNA
ttctggggcacaggggagcagt

SEQ ID NO: 16026 - RNA, 22 nt, synthetic construct
  source 1..22: mol_type = other RNA
aaaacaagagacactggctttt

SEQ ID NO: 16027 - RNA, 22 nt, synthetic construct
  source 1..22: mol_type = other RNA
gcaccttgtctctgttcaaaac

SEQ ID NO: 16028 - RNA, 22 nt, synthetic construct
  source 1..22: mol_type = other RNA
agcaccttgtctctgttcaaaa

SEQ ID NO: 16029 - RNA, 22 nt, synthetic construct
  source 1..22: mol_type = other RNA
cctctggacaaatttagcacct

SEQ ID NO: 16030 - RNA, 22 nt, synthetic construct
  source 1..22: mol_type = other RNA
acctctggacaaatttagcacc

SEQ ID NO: 16031 - RNA, 22 nt, synthetic construct
  source 1..22: mol_type = other RNA
tacctctggacaaatttagcac

SEQ ID NO: 16032 - RNA, 22 nt, synthetic construct
  source 1..22: mol_type = other RNA
ttacctctggacaaatttagca

SEQ ID NO: 16033 - RNA, 22 nt, synthetic construct
  source 1..22: mol_type = other RNA
agcatcatttttacctctggac

SEQ ID NO: 16034 - RNA, 22 nt, synthetic construct
  source 1..22: mol_type = other RNA
cagcatcatttttacctctgga

SEQ ID NO: 16035 - RNA, 22 nt, synthetic construct
  source 1..22: mol_type = other RNA
cccttttcagcatcatttttac

SEQ ID NO: 16036 - RNA, 22 nt, synthetic construct
  source 1..22: mol_type = other RNA
ccccttttcagcatcattttta

SEQ ID NO: 16037 - RNA, 22 nt, synthetic construct
  source 1..22: mol_type = other RNA
agacatttccccttttcagcat

SEQ ID NO: 16038 - RNA, 22 nt, synthetic construct
  source 1..22: mol_type = other RNA
cagacatttccccttttcagca

SEQ ID NO: 16039 - RNA, 22 nt, synthetic construct
  source 1..22: mol_type = other RNA
tcagacatttccccttttcagc

SEQ ID NO: 16040 - RNA, 22 nt, synthetic construct
  source 1..22: mol_type = other RNA
ttttcagacatttccccttttc

SEQ ID NO: 16041 - RNA, 22 nt, synthetic construct
  source 1..22: mol_type = other RNA
ttgttttcagacatttcccctt

SEQ ID NO: 16042 - RNA, 22 nt, synthetic construct
  source 1..22: mol_type = other RNA
aggccagaaagggccctcagtt

SEQ ID NO: 16043 - RNA, 22 nt, synthetic construct
  source 1..22: mol_type = other RNA
aaggccagaaagggccctcagt

SEQ ID NO: 16044 - RNA, 22 nt, synthetic construct
  source 1..22: mol_type = other RNA
agctgaaaataatttaaggcca

SEQ ID NO: 16045 - RNA, 22 nt, synthetic construct
  source 1..22: mol_type = other RNA
cagctgaaaataatttaaggcc

SEQ ID NO: 16046 - RNA, 22 nt, synthetic construct
  source 1..22: mol_type = other RNA
tcagctgaaaataatttaaggc

SEQ ID NO: 16047 - RNA, 22 nt, synthetic construct
  source 1..22: mol_type = other RNA
cgatcttgaactaggggctttt

SEQ ID NO: 16048 - RNA, 22 nt, synthetic construct
  source 1..22: mol_type = other RNA
cccagagcgcagttccgatctt

SEQ ID NO: 16049 - RNA, 22 nt, synthetic construct
  source 1..22: mol_type = other RNA
caccccatggccgctgttcccc

SEQ ID NO: 16050 - RNA, 22 nt, synthetic construct
  source 1..22: mol_type = other RNA
cttccttccttccttcctcaga

SEQ ID NO: 16051 - RNA, 22 nt, synthetic construct
  source 1..22: mol_type = other RNA
ccttccttccttccttcctcag

SEQ ID NO: 16052 - RNA, 22 nt, synthetic construct
  source 1..22: mol_type = other RNA
acagacagatgaggtctacagg

SEQ ID NO: 16053 - RNA, 22 nt, synthetic construct
  source 1..22: mol_type = other RNA
gacagacagatgaggtctacag

SEQ ID NO: 16054 - RNA, 22 nt, synthetic construct
  source 1..22: mol_type = other RNA
tgagtggctaagaaccctgatt

SEQ ID NO: 16055 - RNA, 22 nt, synthetic construct
  source 1..22: mol_type = other RNA
aaagccagcaaggaggccctgt

SEQ ID NO: 16056 - RNA, 22 nt, synthetic construct
  source 1..22: mol_type = other RNA
caggcagagggcacagccggtg

SEQ ID NO: 16057 - RNA, 22 nt, synthetic construct
  source 1..22: mol_type = other RNA
tgccactgcactccagcctggg

SEQ ID NO: 16058 - RNA, 22 nt, synthetic construct
  source 1..22: mol_type = other RNA
cagtgagtcgagattgtgccac

SEQ ID NO: 16059 - RNA, 22 nt, synthetic construct
  source 1..22: mol_type = other RNA
gccagatgtggtgacatgtgcc

SEQ ID NO: 16060 - RNA, 22 nt, synthetic construct
  source 1..22: mol_type = other RNA
agaccatcctggctaacacggt

SEQ ID NO: 16061 - RNA, 22 nt, synthetic construct
  source 1..22: mol_type = other RNA
ggaggccgaggtggggggatca

SEQ ID NO: 16062 - RNA, 22 nt, synthetic construct
  source 1..22: mol_type = other RNA
actgtgagggtcagaaaagacc

SEQ ID NO: 16063 - RNA, 22 nt, synthetic construct
  source 1..22: mol_type = other RNA
aactgtgagggtcagaaaagac

SEQ ID NO: 16064 - RNA, 22 nt, synthetic construct
  source 1..22: mol_type = other RNA
taactgtgagggtcagaaaaga

SEQ ID NO: 16065 - RNA, 22 nt, synthetic construct
  source 1..22: mol_type = other RNA
ttaactgtgagggtcagaaaag

SEQ ID NO: 16066 - RNA, 22 nt, synthetic construct
  source 1..22: mol_type = other RNA
tttttaactgtgagggtcagaa

SEQ ID NO: 16067 - RNA, 22 nt, synthetic construct
  source 1..22: mol_type = other RNA
atttttaactgtgagggtcaga

SEQ ID NO: 16068 - RNA, 22 nt, synthetic construct
  source 1..22: mol_type = other RNA
tatttttaactgtgagggtcag

SEQ ID NO: 16069 - RNA, 22 nt, synthetic construct
  source 1..22: mol_type = other RNA
caggcataagccactgcgcctg

SEQ ID NO: 16070 - RNA, 22 nt, synthetic construct
  source 1..22: mol_type = other RNA
gccaggctggtctcaaactcct

SEQ ID NO: 16071 - RNA, 22 nt, synthetic construct
  source 1..22: mol_type = other RNA
actatgttggccaggctggtct

SEQ ID NO: 16072 - RNA, 22 nt, synthetic construct
  source 1..22: mol_type = other RNA
cactatgttggccaggctggtc

SEQ ID NO: 16073 - RNA, 22 nt, synthetic construct
  source 1..22: mol_type = other RNA
gtagagatggggtttcactatg

SEQ ID NO: 16074 - RNA, 22 nt, synthetic construct
  source 1..22: mol_type = other RNA
agtagagatggggtttcactat

SEQ ID NO: 16075 - RNA, 22 nt, synthetic construct
  source 1..22: mol_type = other RNA
tatatttagtagagatggggtt

SEQ ID NO: 16076 - RNA, 22 nt, synthetic construct
  source 1..22: mol_type = other RNA
gtatatttagtagagatggggt

SEQ ID NO: 16077 - RNA, 22 nt, synthetic construct
  source 1..22: mol_type = other RNA
tgtatatttagtagagatgggg

SEQ ID NO: 16078 - RNA, 22 nt, synthetic construct
  source 1..22: mol_type = other RNA
ttttgtatatttagtagagatg

SEQ ID NO: 16079 - RNA, 22 nt, synthetic construct
  source 1..22: mol_type = other RNA
gttttgtatatttagtagagat

SEQ ID NO: 16080 - RNA, 22 nt, synthetic construct
  source 1..22: mol_type = other RNA
tcctgcctcagcctcccaagta

SEQ ID NO: 16081 - RNA, 22 nt, synthetic construct
  source 1..22: mol_type = other RNA
aaatgattctcctgcctcagcc

SEQ ID NO: 16082 - RNA, 22 nt, synthetic construct
  source 1..22: mol_type = other RNA
caaatgattctcctgcctcagc

SEQ ID NO: 16083 - RNA, 22 nt, synthetic construct
  source 1..22: mol_type = other RNA
agatggggtctcactctgtcat

SEQ ID NO: 16084 - RNA, 22 nt, synthetic construct
  source 1..22: mol_type = other RNA
gagatggggtctcactctgtca

SEQ ID NO: 16085 - RNA, 22 nt, synthetic construct
  source 1..22: mol_type = other RNA
tgagatggggtctcactctgtc

SEQ ID NO: 16086 - RNA, 22 nt, synthetic construct
  source 1..22: mol_type = other RNA
ttgagatggggtctcactctgt

SEQ ID NO: 16087 - RNA, 22 nt, synthetic construct
  source 1..22: mol_type = other RNA
tttttgagatggggtctcactc

SEQ ID NO: 16088 - RNA, 22 nt, synthetic construct
  source 1..22: mol_type = other RNA
atttttgagatggggtctcact

SEQ ID NO: 16089 - RNA, 22 nt, synthetic construct
  source 1..22: mol_type = other RNA
tttatttttgagatggggtctc

SEQ ID NO: 16090 - RNA, 22 nt, synthetic construct
  source 1..22: mol_type = other RNA
atttatttttgagatggggtct

SEQ ID NO: 16091 - RNA, 22 nt, synthetic construct
  source 1..22: mol_type = other RNA
tttatttatttttgagatgggg

SEQ ID NO: 16092 - RNA, 22 nt, synthetic construct
  source 1..22: mol_type = other RNA
atttatttatttttgagatggg

SEQ ID NO: 16093 - RNA, 22 nt, synthetic construct
  source 1..22: mol_type = other RNA
tttatttatttatttttgagat

SEQ ID NO: 16094 - RNA, 22 nt, synthetic construct
  source 1..22: mol_type = other RNA
atttatttatttatttttgaga

SEQ ID NO: 16095 - RNA, 22 nt, synthetic construct
  source 1..22: mol_type = other RNA
tttatttatttatttatttttg

SEQ ID NO: 16096 - RNA, 22 nt, synthetic construct
  source 1..22: mol_type = other RNA
atttatttatttatttattttt

SEQ ID NO: 16097 - RNA, 22 nt, synthetic construct
  source 1..22: mol_type = other RNA
tatttatttatttatttattta

SEQ ID NO: 16098 - RNA, 22 nt, synthetic construct
  source 1..22: mol_type = other RNA
accatgaggggaatggagttct

SEQ ID NO: 16099 - RNA, 22 nt, synthetic construct
  source 1..22: mol_type = other RNA
aaccatgaggggaatggagttc

SEQ ID NO: 16100 - RNA, 22 nt, synthetic construct
  source 1..22: mol_type = other RNA
taaccatgaggggaatggagtt

SEQ ID NO: 16101 - RNA, 22 nt, synthetic construct
  source 1..22: mol_type = other RNA
ttaaccatgaggggaatggagt

SEQ ID NO: 16102 - RNA, 22 nt, synthetic construct
  source 1..22: mol_type = other RNA
tttaaccatgaggggaatggag

SEQ ID NO: 16103 - RNA, 22 nt, synthetic construct
  source 1..22: mol_type = other RNA
ttttaaccatgaggggaatgga

SEQ ID NO: 16104 - RNA, 22 nt, synthetic construct
  source 1..22: mol_type = other RNA
tttttaaccatgaggggaatgg

SEQ ID NO: 16105 - RNA, 22 nt, synthetic construct
  source 1..22: mol_type = other RNA
ttttttaaccatgaggggaatg

SEQ ID NO: 16106 - RNA, 22 nt, synthetic construct
  source 1..22: mol_type = other RNA
tttttttaaccatgaggggaat

SEQ ID NO: 16107 - RNA, 22 nt, synthetic construct
  source 1..22: mol_type = other RNA
caggggggaagatagacagata

SEQ ID NO: 16108 - RNA, 22 nt, synthetic construct
  source 1..22: mol_type = other RNA
tgggccaaacagacgaaaatcc

SEQ ID NO: 16109 - RNA, 22 nt, synthetic construct
  source 1..22: mol_type = other RNA
accgcttgcctactatgtgcca

SEQ ID NO: 16110 - RNA, 22 nt, synthetic construct
  source 1..22: mol_type = other RNA
aatattgaccgcttgcctacta

SEQ ID NO: 16111 - RNA, 22 nt, synthetic construct
  source 1..22: mol_type = other RNA
ttaaatattgaccgcttgccta

SEQ ID NO: 16112 - RNA, 22 nt, synthetic construct
  source 1..22: mol_type = other RNA
gttgttaaatattgaccgcttg

SEQ ID NO: 16113 - RNA, 22 nt, synthetic construct
  source 1..22: mol_type = other RNA
aggcattcgttgttaaatattg

SEQ ID NO: 16114 - RNA, 22 nt, synthetic construct
  source 1..22: mol_type = other RNA
ttggattaaggcattcgttgtt

SEQ ID NO: 16115 - RNA, 22 nt, synthetic construct
  source 1..22: mol_type = other RNA
accccaatcttatgggggttct

SEQ ID NO: 16116 - RNA, 22 nt, synthetic construct
  source 1..22: mol_type = other RNA
caccccaatcttatgggggttc

SEQ ID NO: 16117 - RNA, 22 nt, synthetic construct
  source 1..22: mol_type = other RNA
actccaggatctggcatttggc

SEQ ID NO: 16118 - RNA, 22 nt, synthetic construct
  source 1..22: mol_type = other RNA
gactccaggatctggcatttgg

SEQ ID NO: 16119 - RNA, 22 nt, synthetic construct
  source 1..22: mol_type = other RNA
tcggcctctgaaatcctgaagt

SEQ ID NO: 16120 - RNA, 22 nt, synthetic construct
  source 1..22: mol_type = other RNA
cgaaatgttctcggcctctgaa

SEQ ID NO: 16121 - RNA, 22 nt, synthetic construct
  source 1..22: mol_type = other RNA
attccgaaatgttctcggcctc

SEQ ID NO: 16122 - RNA, 22 nt, synthetic construct
  source 1..22: mol_type = other RNA
aaaaacagtaaccgcgcacggt

SEQ ID NO: 16123 - RNA, 22 nt, synthetic construct
  source 1..22: mol_type = other RNA
aatgagcatccttgataaacat

SEQ ID NO: 16124 - RNA, 22 nt, synthetic construct
  source 1..22: mol_type = other RNA
gaatgagcatccttgataaaca

SEQ ID NO: 16125 - RNA, 22 nt, synthetic construct
  source 1..22: mol_type = other RNA
tttgaatgagcatccttgataa

SEQ ID NO: 16126 - RNA, 22 nt, synthetic construct
  source 1..22: mol_type = other RNA
gtttgaatgagcatccttgata

SEQ ID NO: 16127 - RNA, 22 nt, synthetic construct
  source 1..22: mol_type = other RNA
tttgtttgaatgagcatccttg

SEQ ID NO: 16128 - RNA, 22 nt, synthetic construct
  source 1..22: mol_type = other RNA
gtttgtttgaatgagcatcctt

SEQ ID NO: 16129 - RNA, 22 nt, synthetic construct
  source 1..22: mol_type = other RNA
tttgtttgtttgaatgagcatc

SEQ ID NO: 16130 - RNA, 22 nt, synthetic construct
  source 1..22: mol_type = other RNA
ttatttgtttgtttgaatgagc

SEQ ID NO: 16131 - RNA, 22 nt, synthetic construct
  source 1..22: mol_type = other RNA
ttgttatttgtttgtttgaatg

SEQ ID NO: 16132 - RNA, 22 nt, synthetic construct
  source 1..22: mol_type = other RNA
gttgttatttgtttgtttgaat

SEQ ID NO: 16133 - RNA, 22 nt, synthetic construct
  source 1..22: mol_type = other RNA
tgttgttatttgtttgtttgaa

SEQ ID NO: 16134 - RNA, 22 nt, synthetic construct
  source 1..22: mol_type = other RNA
tggtgccagcagtgggtatttt

SEQ ID NO: 16135 - RNA, 22 nt, synthetic construct
  source 1..22: mol_type = other RNA
gtaaaattatggtgccagcagt

SEQ ID NO: 16136 - RNA, 22 nt, synthetic construct
  source 1..22: mol_type = other RNA
tttggtaaaattatggtgccag

SEQ ID NO: 16137 - RNA, 22 nt, synthetic construct
  source 1..22: mol_type = other RNA
gaatgatcattctttggtaaaa

SEQ ID NO: 16138 - RNA, 22 nt, synthetic construct
  source 1..22: mol_type = other RNA
aatattagaatgatcattcttt

SEQ ID NO: 16139 - RNA, 22 nt, synthetic construct
  source 1..22: mol_type = other RNA
caatattagaatgatcattctt

SEQ ID NO: 16140 - RNA, 22 nt, synthetic construct
  source 1..22: mol_type = other RNA
tcaatattagaatgatcattct

SEQ ID NO: 16141 - RNA, 22 nt, synthetic construct
  source 1..22: mol_type = other RNA
aactttttcaatattagaatga

SEQ ID NO: 16142 - RNA, 22 nt, synthetic construct
  source 1..22: mol_type = other RNA
tgtcctttgaactttttcaata

SEQ ID NO: 16143 - RNA, 22 nt, synthetic construct
  source 1..22: mol_type = other RNA
tgcaattatgtcctttgaactt

SEQ ID NO: 16144 - RNA, 22 nt, synthetic construct
  source 1..22: mol_type = other RNA
ttctgcaattatgtcctttgaa

SEQ ID NO: 16145 - RNA, 22 nt, synthetic construct
  source 1..22: mol_type = other RNA
attctgcaattatgtcctttga

SEQ ID NO: 16146 - RNA, 22 nt, synthetic construct
  source 1..22: mol_type = other RNA
catataaagagctgtcttttat

SEQ ID NO: 16147 - RNA, 22 nt, synthetic construct
  source 1..22: mol_type = other RNA
aatgcattccatataaagagct

SEQ ID NO: 16148 - RNA, 22 nt, synthetic construct
  source 1..22: mol_type = other RNA
aaaatatggttaaatgcattcc

SEQ ID NO: 16149 - RNA, 22 nt, synthetic construct
  source 1..22: mol_type = other RNA
aaaaatatggttaaatgcattc

SEQ ID NO: 16150 - RNA, 22 nt, synthetic construct
  source 1..22: mol_type = other RNA
gtttaaaaatatggttaaatgc

SEQ ID NO: 16151 - RNA, 22 nt, synthetic construct
  source 1..22: mol_type = other RNA
agtttaaaaatatggttaaatg

SEQ ID NO: 16152 - RNA, 22 nt, synthetic construct
  source 1..22: mol_type = other RNA
gagcagacttcaaggggatgag

SEQ ID NO: 16153 - RNA, 22 nt, synthetic construct
  source 1..22: mol_type = other RNA
agagcagacttcaaggggatga

SEQ ID NO: 16154 - RNA, 22 nt, synthetic construct
  source 1..22: mol_type = other RNA
catatagggaaactgaggcact

SEQ ID NO: 16155 - RNA, 22 nt, synthetic construct
  source 1..22: mol_type = other RNA
acatatagggaaactgaggcac

SEQ ID NO: 16156 - RNA, 22 nt, synthetic construct
  source 1..22: mol_type = other RNA
tacatatagggaaactgaggca

SEQ ID NO: 16157 - RNA, 22 nt, synthetic construct
  source 1..22: mol_type = other RNA
ctcctcaagactctgagctatg

SEQ ID NO: 16158 - RNA, 22 nt, synthetic construct
  source 1..22: mol_type = other RNA
actcctcaagactctgagctat

SEQ ID NO: 16159 - RNA, 22 nt, synthetic construct
  source 1..22: mol_type = other RNA
taagccaggggcatgctaggcc

SEQ ID NO: 16160 - RNA, 22 nt, synthetic construct
  source 1..22: mol_type = other RNA
ttataagccaggggcatgctag

SEQ ID NO: 16161 - RNA, 22 nt, synthetic construct
  source 1..22: mol_type = other RNA
attataagccaggggcatgcta

SEQ ID NO: 16162 - RNA, 22 nt, synthetic construct
  source 1..22: mol_type = other RNA
agcatttattataagccagggg

SEQ ID NO: 16163 - RNA, 22 nt, synthetic construct
  source 1..22: mol_type = other RNA
ttgagcatttattataagccag

SEQ ID NO: 16164 - RNA, 22 nt, synthetic construct
  source 1..22: mol_type = other RNA
gttgagcatttattataagcca

SEQ ID NO: 16165 - RNA, 22 nt, synthetic construct
  source 1..22: mol_type = other RNA
ataacaaaaggaaccatttgtt

SEQ ID NO: 16166 - RNA, 22 nt, synthetic construct
  source 1..22: mol_type = other RNA
aataacaaaaggaaccatttgt

SEQ ID NO: 16167 - RNA, 22 nt, synthetic construct
  source 1..22: mol_type = other RNA
taataacaaaaggaaccatttg

SEQ ID NO: 16168 - RNA, 22 nt, synthetic construct
  source 1..22: mol_type = other RNA
cattttaataacaaaaggaacc

SEQ ID NO: 16169 - RNA, 22 nt, synthetic construct
  source 1..22: mol_type = other RNA
actaatatgcctttgcatttta

SEQ ID NO: 16170 - RNA, 22 nt, synthetic construct
  source 1..22: mol_type = other RNA
ttactcttcccaacatccacag

SEQ ID NO: 16171 - RNA, 22 nt, synthetic construct
  source 1..22: mol_type = other RNA
tctctaagtagggagccagttc

SEQ ID NO: 16172 - RNA, 22 nt, synthetic construct
  source 1..22: mol_type = other RNA
gtctctaagtagggagccagtt

SEQ ID NO: 16173 - RNA, 22 nt, synthetic construct
  source 1..22: mol_type = other RNA
ggctcccatcttggggctcccc

SEQ ID NO: 16174 - RNA, 22 nt, synthetic construct
  source 1..22: mol_type = other RNA
gccaagtgtggtggtgtgtcct

SEQ ID NO: 16175 - RNA, 22 nt, synthetic construct
  source 1..22: mol_type = other RNA
aagaccagcttgggcaacatag

SEQ ID NO: 16176 - RNA, 22 nt, synthetic construct
  source 1..22: mol_type = other RNA
ggaggccaaggtaagaggactg

SEQ ID NO: 16177 - RNA, 22 nt, synthetic construct
  source 1..22: mol_type = other RNA
gggaggccaaggtaagaggact

SEQ ID NO: 16178 - RNA, 22 nt, synthetic construct
  source 1..22: mol_type = other RNA
tgggaggccaaggtaagaggac

SEQ ID NO: 16179 - RNA, 22 nt, synthetic construct
  source 1..22: mol_type = other RNA
cagcattttgggaggccaaggt

SEQ ID NO: 16180 - RNA, 22 nt, synthetic construct
  source 1..22: mol_type = other RNA
aggctgggaacagtggctcatg

SEQ ID NO: 16181 - RNA, 22 nt, synthetic construct
  source 1..22: mol_type = other RNA
atagccccccataagaggccag

SEQ ID NO: 16182 - RNA, 22 nt, synthetic construct
  source 1..22: mol_type = other RNA
catagccccccataagaggcca

SEQ ID NO: 16183 - RNA, 22 nt, synthetic construct
  source 1..22: mol_type = other RNA
tgcttggggtagatttcatagc

SEQ ID NO: 16184 - RNA, 22 nt, synthetic construct
  source 1..22: mol_type = other RNA
ctgcttggggtagatttcatag

SEQ ID NO: 16185 - RNA, 22 nt, synthetic construct
  source 1..22: mol_type = other RNA
agccccagggtggggcagagac

SEQ ID NO: 16186 - RNA, 22 nt, synthetic construct
  source 1..22: mol_type = other RNA
gggaaagcctgggggcctgaga

SEQ ID NO: 16187 - RNA, 22 nt, synthetic construct
  source 1..22: mol_type = other RNA
ggggaaagcctgggggcctgag

SEQ ID NO: 16188 - RNA, 22 nt, synthetic construct
  source 1..22: mol_type = other RNA
agaggaaggggtcccagagtct

SEQ ID NO: 16189 - RNA, 22 nt, synthetic construct
  source 1..22: mol_type = other RNA
gaggctgcagtgagctatgatc

SEQ ID NO: 16190 - RNA, 22 nt, synthetic construct
  source 1..22: mol_type = other RNA
ctgggcactgtagcatgcacct

SEQ ID NO: 16191 - RNA, 22 nt, synthetic construct
  source 1..22: mol_type = other RNA
tcaaaacccagaggttgctggg

SEQ ID NO: 16192 - RNA, 22 nt, synthetic construct
  source 1..22: mol_type = other RNA
gggttgtcaaaacccagaggtt

SEQ ID NO: 16193 - RNA, 22 nt, synthetic construct
  source 1..22: mol_type = other RNA
ggggttgtcaaaacccagaggt

SEQ ID NO: 16194 - RNA, 22 nt, synthetic construct
  source 1..22: mol_type = other RNA
tgcaggtgccttgggggcagga

SEQ ID NO: 16195 - RNA, 22 nt, synthetic construct
  source 1..22: mol_type = other RNA
tttctgcaggtgccttgggggc

SEQ ID NO: 16196 - RNA, 22 nt, synthetic construct
  source 1..22: mol_type = other RNA
ctttctgcaggtgccttggggg

SEQ ID NO: 16197 - RNA, 22 nt, synthetic construct
  source 1..22: mol_type = other RNA
aggatgcagtaggcggaagaga

SEQ ID NO: 16198 - RNA, 22 nt, synthetic construct
  source 1..22: mol_type = other RNA
ccatctgatgtggcgtcatctc

SEQ ID NO: 16199 - RNA, 22 nt, synthetic construct
  source 1..22: mol_type = other RNA
tcactggggattcccatctgat

SEQ ID NO: 16200 - RNA, 22 nt, synthetic construct
  source 1..22: mol_type = other RNA
gtcactggggattcccatctga

SEQ ID NO: 16201 - RNA, 22 nt, synthetic construct
  source 1..22: mol_type = other RNA
tgtcactggggattcccatctg

SEQ ID NO: 16202 - RNA, 22 nt, synthetic construct
  source 1..22: mol_type = other RNA
ttgtcactggggattcccatct

SEQ ID NO: 16203 - RNA, 22 nt, synthetic construct
  source 1..22: mol_type = other RNA
tttgtcactggggattcccatc

SEQ ID NO: 16204 - RNA, 22 nt, synthetic construct
  source 1..22: mol_type = other RNA
aaaggtcacgaaaggatctaca

SEQ ID NO: 16205 - RNA, 22 nt, synthetic construct
  source 1..22: mol_type = other RNA
caaaggtcacgaaaggatctac

SEQ ID NO: 16206 - RNA, 22 nt, synthetic construct
  source 1..22: mol_type = other RNA
tgaggaaaggagtttcaaaggt

SEQ ID NO: 16207 - RNA, 22 nt, synthetic construct
  source 1..22: mol_type = other RNA
ctgagagcagcaaatgaggttg

SEQ ID NO: 16208 - RNA, 22 nt, synthetic construct
  source 1..22: mol_type = other RNA
gcttcttaggaactaagcccct

SEQ ID NO: 16209 - RNA, 22 nt, synthetic construct
  source 1..22: mol_type = other RNA
agcttcttaggaactaagcccc

SEQ ID NO: 16210 - RNA, 22 nt, synthetic construct
  source 1..22: mol_type = other RNA
agacgaggacttcatcacctgg

SEQ ID NO: 16211 - RNA, 22 nt, synthetic construct
  source 1..22: mol_type = other RNA
cagacgaggacttcatcacctg

SEQ ID NO: 16212 - RNA, 22 nt, synthetic construct
  source 1..22: mol_type = other RNA
ctgagcttttcagacgaggact

SEQ ID NO: 16213 - RNA, 22 nt, synthetic construct
  source 1..22: mol_type = other RNA
tcactcagcgcatccaggctgc

SEQ ID NO: 16214 - RNA, 22 nt, synthetic construct
  source 1..22: mol_type = other RNA
caaggacttcagctgggggaag

SEQ ID NO: 16215 - RNA, 22 nt, synthetic construct
  source 1..22: mol_type = other RNA
ccaaggacttcagctgggggaa

SEQ ID NO: 16216 - RNA, 22 nt, synthetic construct
  source 1..22: mol_type = other RNA
agcaggaagggcaggcccagct

SEQ ID NO: 16217 - RNA, 22 nt, synthetic construct
  source 1..22: mol_type = other RNA
ggggcccgattcagcaggaagg

SEQ ID NO: 16218 - RNA, 22 nt, synthetic construct
  source 1..22: mol_type = other RNA
aaaaagtcagccggactttggg

SEQ ID NO: 16219 - RNA, 22 nt, synthetic construct
  source 1..22: mol_type = other RNA
gaaaaagtcagccggactttgg

SEQ ID NO: 16220 - RNA, 22 nt, synthetic construct
  source 1..22: mol_type = other RNA
tgaaaaagtcagccggactttg

SEQ ID NO: 16221 - RNA, 22 nt, synthetic construct
  source 1..22: mol_type = other RNA
attttgaaaaagtcagccggac

SEQ ID NO: 16222 - RNA, 22 nt, synthetic construct
  source 1..22: mol_type = other RNA
aattaattttgaaaaagtcagc

SEQ ID NO: 16223 - RNA, 22 nt, synthetic construct
  source 1..22: mol_type = other RNA
aaattaattttgaaaaagtcag

SEQ ID NO: 16224 - RNA, 22 nt, synthetic construct
  source 1..22: mol_type = other RNA
tagcctgggtgacacagcgagc

SEQ ID NO: 16225 - RNA, 22 nt, synthetic construct
  source 1..22: mol_type = other RNA
aaggctgcagaggtatgatcat

SEQ ID NO: 16226 - RNA, 22 nt, synthetic construct
  source 1..22: mol_type = other RNA
cttgaggccaggagttcaaggc

SEQ ID NO: 16227 - RNA, 22 nt, synthetic construct
  source 1..22: mol_type = other RNA
ggaagcggaggtgaggagattc

SEQ ID NO: 16228 - RNA, 22 nt, synthetic construct
  source 1..22: mol_type = other RNA
aataggtgaatgagtgaatgga

SEQ ID NO: 16229 - RNA, 22 nt, synthetic construct
  source 1..22: mol_type = other RNA
aatggaaggatgaatggctgat

SEQ ID NO: 16230 - RNA, 22 nt, synthetic construct
  source 1..22: mol_type = other RNA
gatgagggagtaaagaaatgac

SEQ ID NO: 16231 - RNA, 22 nt, synthetic construct
  source 1..22: mol_type = other RNA
agtgagcggttggatgagggag

SEQ ID NO: 16232 - RNA, 22 nt, synthetic construct
  source 1..22: mol_type = other RNA
ggtaagtaaagaaatgattgag

SEQ ID NO: 16233 - RNA, 22 nt, synthetic construct
  source 1..22: mol_type = other RNA
ataaatggttgggtaagtaaag

SEQ ID NO: 16234 - RNA, 22 nt, synthetic construct
  source 1..22: mol_type = other RNA
aattaataaatggttgggtaag

SEQ ID NO: 16235 - RNA, 22 nt, synthetic construct
  source 1..22: mol_type = other RNA
attaaattaataaatggttggg

SEQ ID NO: 16236 - RNA, 22 nt, synthetic construct
  source 1..22: mol_type = other RNA
ttgattaaattaataaatggtt

SEQ ID NO: 16237 - RNA, 22 nt, synthetic construct
  source 1..22: mol_type = other RNA
gttgattaaattaataaatggt

SEQ ID NO: 16238 - RNA, 22 nt, synthetic construct
  source 1..22: mol_type = other RNA
aagctgggtctccagggcctag

SEQ ID NO: 16239 - RNA, 22 nt, synthetic construct
  source 1..22: mol_type = other RNA
aaagctgggtctccagggccta

SEQ ID NO: 16240 - RNA, 22 nt, synthetic construct
  source 1..22: mol_type = other RNA
tttaaagctgggtctccagggc

SEQ ID NO: 16241 - RNA, 22 nt, synthetic construct
  source 1..22: mol_type = other RNA
gtttaaagctgggtctccaggg

SEQ ID NO: 16242 - RNA, 22 nt, synthetic construct
  source 1..22: mol_type = other RNA
tgtttaaagctgggtctccagg

SEQ ID NO: 16243 - RNA, 22 nt, synthetic construct
  source 1..22: mol_type = other RNA
ttttgtttaaagctgggtctcc

SEQ ID NO: 16244 - RNA, 22 nt, synthetic construct
  source 1..22: mol_type = other RNA
gttttgtttaaagctgggtctc

SEQ ID NO: 16245 - RNA, 22 nt, synthetic construct
  source 1..22: mol_type = other RNA
tttgttttgtttaaagctgggt

SEQ ID NO: 16246 - RNA, 22 nt, synthetic construct
  source 1..22: mol_type = other RNA
atttgttttgtttaaagctggg

SEQ ID NO: 16247 - RNA, 22 nt, synthetic construct
  source 1..22: mol_type = other RNA
ctgaggtcaggggatttatttg

SEQ ID NO: 16248 - RNA, 22 nt, synthetic construct
  source 1..22: mol_type = other RNA
agattcctgaggtcaggggatt

SEQ ID NO: 16249 - RNA, 22 nt, synthetic construct
  source 1..22: mol_type = other RNA
aagattcctgaggtcaggggat

SEQ ID NO: 16250 - RNA, 22 nt, synthetic construct
  source 1..22: mol_type = other RNA
tgtctcctcactagaatttaag

SEQ ID NO: 16251 - RNA, 22 nt, synthetic construct
  source 1..22: mol_type = other RNA
attgtgtctcctcactagaatt

SEQ ID NO: 16252 - RNA, 22 nt, synthetic construct
  source 1..22: mol_type = other RNA
cttgttcattgtgtctcctcac

SEQ ID NO: 16253 - RNA, 22 nt, synthetic construct
  source 1..22: mol_type = other RNA
acttgttcattgtgtctcctca

SEQ ID NO: 16254 - RNA, 22 nt, synthetic construct
  source 1..22: mol_type = other RNA
ccgacttgtttacttgttcatt

SEQ ID NO: 16255 - RNA, 22 nt, synthetic construct
  source 1..22: mol_type = other RNA
taattaccgacttgtttacttg

SEQ ID NO: 16256 - RNA, 22 nt, synthetic construct
  source 1..22: mol_type = other RNA
ctgtatactttataattaccga

SEQ ID NO: 16257 - RNA, 22 nt, synthetic construct
  source 1..22: mol_type = other RNA
attactgtatactttataatta

SEQ ID NO: 16258 - RNA, 22 nt, synthetic construct
  source 1..22: mol_type = other RNA
cattactgtatactttataatt

SEQ ID NO: 16259 - RNA, 22 nt, synthetic construct
  source 1..22: mol_type = other RNA
tcattactgtatactttataat

SEQ ID NO: 16260 - RNA, 22 nt, synthetic construct
  source 1..22: mol_type = other RNA
ttttcattactgtatactttat

SEQ ID NO: 16261 - RNA, 22 nt, synthetic construct
  source 1..22: mol_type = other RNA
tgtcaccaaacattattttcat

SEQ ID NO: 16262 - RNA, 22 nt, synthetic construct
  source 1..22: mol_type = other RNA
ctgtcaccaaacattattttca

SEQ ID NO: 16263 - RNA, 22 nt, synthetic construct
  source 1..22: mol_type = other RNA
tctgtcaccaaacattattttc

SEQ ID NO: 16264 - RNA, 22 nt, synthetic construct
  source 1..22: mol_type = other RNA
accccccagtataattttctgt

SEQ ID NO: 16265 - RNA, 22 nt, synthetic construct
  source 1..22: mol_type = other RNA
caccccccagtataattttctg

SEQ ID NO: 16266 - RNA, 22 nt, synthetic construct
  source 1..22: mol_type = other RNA
ataaatcctaatctatctctcc

SEQ ID NO: 16267 - RNA, 22 nt, synthetic construct
  source 1..22: mol_type = other RNA
ttgataaatcctaatctatctc

SEQ ID NO: 16268 - RNA, 22 nt, synthetic construct
  source 1..22: mol_type = other RNA
ataataatgctttattgataaa

SEQ ID NO: 16269 - RNA, 22 nt, synthetic construct
  source 1..22: mol_type = other RNA
gataataatgctttattgataa

SEQ ID NO: 16270 - RNA, 22 nt, synthetic construct
  source 1..22: mol_type = other RNA
tgataataatgctttattgata

SEQ ID NO: 16271 - RNA, 22 nt, synthetic construct
  source 1..22: mol_type = other RNA
ctgttttgataataatgcttta

SEQ ID NO: 16272 - RNA, 22 nt, synthetic construct
  source 1..22: mol_type = other RNA
actgttttgataataatgcttt

SEQ ID NO: 16273 - RNA, 22 nt, synthetic construct
  source 1..22: mol_type = other RNA
tactgttttgataataatgctt

SEQ ID NO: 16274 - RNA, 22 nt, synthetic construct
  source 1..22: mol_type = other RNA
aaaagttttactgttttgataa

SEQ ID NO: 16275 - RNA, 22 nt, synthetic construct
  source 1..22: mol_type = other RNA
aaaaagttttactgttttgata

SEQ ID NO: 16276 - RNA, 22 nt, synthetic construct
  source 1..22: mol_type = other RNA
taaaaagttttactgttttgat

SEQ ID NO: 16277 - RNA, 22 nt, synthetic construct
  source 1..22: mol_type = other RNA
ttaaaaagttttactgttttga

SEQ ID NO: 16278 - RNA, 22 nt, synthetic construct
  source 1..22: mol_type = other RNA
atcctcctgtatcttatccatc

SEQ ID NO: 16279 - RNA, 22 nt, synthetic construct
  source 1..22: mol_type = other RNA
caccactgcactccaccctggg

SEQ ID NO: 16280 - RNA, 22 nt, synthetic construct
  source 1..22: mol_type = other RNA
aggctgcagtgagccatgatta

SEQ ID NO: 16281 - RNA, 22 nt, synthetic construct
  source 1..22: mol_type = other RNA
cttgagcctaggagattgaggc

SEQ ID NO: 16282 - RNA, 22 nt, synthetic construct
  source 1..22: mol_type = other RNA
agatgggaggattgcttgagcc

SEQ ID NO: 16283 - RNA, 22 nt, synthetic construct
  source 1..22: mol_type = other RNA
gcgggacgtggtggcatgcacc

SEQ ID NO: 16284 - RNA, 22 nt, synthetic construct
  source 1..22: mol_type = other RNA
aagaccagcctgggcaacgtgg

SEQ ID NO: 16285 - RNA, 22 nt, synthetic construct
  source 1..22: mol_type = other RNA
ggaggcagaggcaggaggatgg

SEQ ID NO: 16286 - RNA, 22 nt, synthetic construct
  source 1..22: mol_type = other RNA
aaccaggcacagtgactcatgc

SEQ ID NO: 16287 - RNA, 22 nt, synthetic construct
  source 1..22: mol_type = other RNA
caataaatagatcgtaccactg

SEQ ID NO: 16288 - RNA, 22 nt, synthetic construct
  source 1..22: mol_type = other RNA
gcaataaatagatcgtaccact

SEQ ID NO: 16289 - RNA, 22 nt, synthetic construct
  source 1..22: mol_type = other RNA
cttgaacccaggaggtgaagtt

SEQ ID NO: 16290 - RNA, 22 nt, synthetic construct
  source 1..22: mol_type = other RNA
cagctacttgggaggctgaggt

SEQ ID NO: 16291 - RNA, 22 nt, synthetic construct
  source 1..22: mol_type = other RNA
ggtgtagtggtgcatgcctgta

SEQ ID NO: 16292 - RNA, 22 nt, synthetic construct
  source 1..22: mol_type = other RNA
gttgggtgtagtggtgcatgcc

SEQ ID NO: 16293 - RNA, 22 nt, synthetic construct
  source 1..22: mol_type = other RNA
aagaccagcctggccaacctgg

SEQ ID NO: 16294 - RNA, 22 nt, synthetic construct
  source 1..22: mol_type = other RNA
ggaggctgaggtgggcggatca

SEQ ID NO: 16295 - RNA, 22 nt, synthetic construct
  source 1..22: mol_type = other RNA
aactgggcgtggtggctcatgc

SEQ ID NO: 16296 - RNA, 22 nt, synthetic construct
  source 1..22: mol_type = other RNA
agtaaaaaatcatgttgaactg

SEQ ID NO: 16297 - RNA, 22 nt, synthetic construct
  source 1..22: mol_type = other RNA
atatcctctaggttcagtaaaa

SEQ ID NO: 16298 - RNA, 22 nt, synthetic construct
  source 1..22: mol_type = other RNA
gatatcctctaggttcagtaaa

SEQ ID NO: 16299 - RNA, 22 nt, synthetic construct
  source 1..22: mol_type = other RNA
tgatatcctctaggttcagtaa

SEQ ID NO: 16300 - RNA, 22 nt, synthetic construct
  source 1..22: mol_type = other RNA
tgagggggagtgtgggaagatt

SEQ ID NO: 16301 - RNA, 22 nt, synthetic construct
  source 1..22: mol_type = other RNA
gccatcctaagaccttggttgt

SEQ ID NO: 16302 - RNA, 22 nt, synthetic construct
  source 1..22: mol_type = other RNA
ggccatcctaagaccttggttg

SEQ ID NO: 16303 - RNA, 22 nt, synthetic construct
  source 1..22: mol_type = other RNA
tttggccatcctaagaccttgg

SEQ ID NO: 16304 - RNA, 22 nt, synthetic construct
  source 1..22: mol_type = other RNA
cggtaaattatttggccatcct

SEQ ID NO: 16305 - RNA, 22 nt, synthetic construct
  source 1..22: mol_type = other RNA
ctaagtaaattccggtaaatta

SEQ ID NO: 16306 - RNA, 22 nt, synthetic construct
  source 1..22: mol_type = other RNA
aggaaattgctaagtaaattcc

SEQ ID NO: 16307 - RNA, 22 nt, synthetic construct
  source 1..22: mol_type = other RNA
ctggagaagtcccacagtccta

SEQ ID NO: 16308 - RNA, 22 nt, synthetic construct
  source 1..22: mol_type = other RNA
cctaggacactagaaattactg

SEQ ID NO: 16309 - RNA, 22 nt, synthetic construct
  source 1..22: mol_type = other RNA
ctgtatccctgtgcctagagca

SEQ ID NO: 16310 - RNA, 22 nt, synthetic construct
  source 1..22: mol_type = other RNA
ctcattactgtatccctgtgcc

SEQ ID NO: 16311 - RNA, 22 nt, synthetic construct
  source 1..22: mol_type = other RNA
gctcattactgtatccctgtgc

SEQ ID NO: 16312 - RNA, 22 nt, synthetic construct
  source 1..22: mol_type = other RNA
tgctcattactgtatccctgtg

SEQ ID NO: 16313 - RNA, 22 nt, synthetic construct
  source 1..22: mol_type = other RNA
tgggcttcacatggagcagggc

SEQ ID NO: 16314 - RNA, 22 nt, synthetic construct
  source 1..22: mol_type = other RNA
tgccgggttgtgggcttcacat

SEQ ID NO: 16315 - RNA, 22 nt, synthetic construct
  source 1..22: mol_type = other RNA
atggctgtgtaatcctttctgc

SEQ ID NO: 16316 - RNA, 22 nt, synthetic construct
  source 1..22: mol_type = other RNA
aatggctgtgtaatcctttctg

SEQ ID NO: 16317 - RNA, 22 nt, synthetic construct
  source 1..22: mol_type = other RNA
tttaatggctgtgtaatccttt

SEQ ID NO: 16318 - RNA, 22 nt, synthetic construct
  source 1..22: mol_type = other RNA
gtttaatggctgtgtaatcctt

SEQ ID NO: 16319 - RNA, 22 nt, synthetic construct
  source 1..22: mol_type = other RNA
tttgtttaatggctgtgtaatc

SEQ ID NO: 16320 - RNA, 22 nt, synthetic construct
  source 1..22: mol_type = other RNA
gcattatttgtttaatggctgt

SEQ ID NO: 16321 - RNA, 22 nt, synthetic construct
  source 1..22: mol_type = other RNA
agcactataatgaaataagtgt

SEQ ID NO: 16322 - RNA, 22 nt, synthetic construct
  source 1..22: mol_type = other RNA
cagcactataatgaaataagtg

SEQ ID NO: 16323 - RNA, 22 nt, synthetic construct
  source 1..22: mol_type = other RNA
cctctgcgccacttttcagcac

SEQ ID NO: 16324 - RNA, 22 nt, synthetic construct
  source 1..22: mol_type = other RNA
ccctctgcgccacttttcagca

SEQ ID NO: 16325 - RNA, 22 nt, synthetic construct
  source 1..22: mol_type = other RNA
caacatcccctcttttccctct

SEQ ID NO: 16326 - RNA, 22 nt, synthetic construct
  source 1..22: mol_type = other RNA
ggtcctgtggccaagtgggagg

SEQ ID NO: 16327 - RNA, 22 nt, synthetic construct
  source 1..22: mol_type = other RNA
tgggtcataggctgtgaatggc

SEQ ID NO: 16328 - RNA, 22 nt, synthetic construct
  source 1..22: mol_type = other RNA
acctcaaggagagttctgggtc

SEQ ID NO: 16329 - RNA, 22 nt, synthetic construct
  source 1..22: mol_type = other RNA
tgggacagactgcggggacaca

SEQ ID NO: 16330 - RNA, 22 nt, synthetic construct
  source 1..22: mol_type = other RNA
ttctgggacagactgcggggac

SEQ ID NO: 16331 - RNA, 22 nt, synthetic construct
  source 1..22: mol_type = other RNA
taggcacccaggtcagtgatgt

SEQ ID NO: 16332 - RNA, 22 nt, synthetic construct
  source 1..22: mol_type = other RNA
gtaggcacccaggtcagtgatg

SEQ ID NO: 16333 - RNA, 22 nt, synthetic construct
  source 1..22: mol_type = other RNA
cctgcgctctgcagccccccag

SEQ ID NO: 16334 - RNA, 22 nt, synthetic construct
  source 1..22: mol_type = other RNA
cttctagggtctcagtgtcccc

SEQ ID NO: 16335 - RNA, 22 nt, synthetic construct
  source 1..22: mol_type = other RNA
agggctgtggtgattgcttcta

SEQ ID NO: 16336 - RNA, 22 nt, synthetic construct
  source 1..22: mol_type = other RNA
ttcagggctgtggtgattgctt

SEQ ID NO: 16337 - RNA, 22 nt, synthetic construct
  source 1..22: mol_type = other RNA
gttcagggctgtggtgattgct

SEQ ID NO: 16338 - RNA, 22 nt, synthetic construct
  source 1..22: mol_type = other RNA
accacgtcccgctaatcctttt

SEQ ID NO: 16339 - RNA, 22 nt, synthetic construct
  source 1..22: mol_type = other RNA
tttcaccacgtcccgctaatcc

SEQ ID NO: 16340 - RNA, 22 nt, synthetic construct
  source 1..22: mol_type = other RNA
ctttcaccacgtcccgctaatc

SEQ ID NO: 16341 - RNA, 22 nt, synthetic construct
  source 1..22: mol_type = other RNA
caggtaagaaaacagcggctag

SEQ ID NO: 16342 - RNA, 22 nt, synthetic construct
  source 1..22: mol_type = other RNA
ccaggtaagaaaacagcggcta

SEQ ID NO: 16343 - RNA, 22 nt, synthetic construct
  source 1..22: mol_type = other RNA
tccaggtaagaaaacagcggct

SEQ ID NO: 16344 - RNA, 22 nt, synthetic construct
  source 1..22: mol_type = other RNA
ccattttccaggtaagaaaaca

SEQ ID NO: 16345 - RNA, 22 nt, synthetic construct
  source 1..22: mol_type = other RNA
ggatggttcccattttccaggt

SEQ ID NO: 16346 - RNA, 22 nt, synthetic construct
  source 1..22: mol_type = other RNA
tgacaagtgcttacatagacca

SEQ ID NO: 16347 - RNA, 22 nt, synthetic construct
  source 1..22: mol_type = other RNA
cataacagaacctggcattgtg

SEQ ID NO: 16348 - RNA, 22 nt, synthetic construct
  source 1..22: mol_type = other RNA
ttgcataacagaacctggcatt

SEQ ID NO: 16349 - RNA, 22 nt, synthetic construct
  source 1..22: mol_type = other RNA
attgcataacagaacctggcat

SEQ ID NO: 16350 - RNA, 22 nt, synthetic construct
  source 1..22: mol_type = other RNA
cggaaaaagcctggtcccgcca

SEQ ID NO: 16351 - RNA, 22 nt, synthetic construct
  source 1..22: mol_type = other RNA
gccttccagaagccaccacccc

SEQ ID NO: 16352 - RNA, 22 nt, synthetic construct
  source 1..22: mol_type = other RNA
cctctgggaccacaccagggcc

SEQ ID NO: 16353 - RNA, 22 nt, synthetic construct
  source 1..22: mol_type = other RNA
gatgactggggctctggtccaa

SEQ ID NO: 16354 - RNA, 22 nt, synthetic construct
  source 1..22: mol_type = other RNA
tcctcagtaagtgaagagctct

SEQ ID NO: 16355 - RNA, 22 nt, synthetic construct
  source 1..22: mol_type = other RNA
ctgggaatctgactctggttgt

SEQ ID NO: 16356 - RNA, 22 nt, synthetic construct
  source 1..22: mol_type = other RNA
aaaataaataaataataaggga

SEQ ID NO: 16357 - RNA, 22 nt, synthetic construct
  source 1..22: mol_type = other RNA
aaaaaattaaaaataaataaat

SEQ ID NO: 16358 - RNA, 22 nt, synthetic construct
  source 1..22: mol_type = other RNA
cagtgagctgagatcacaccac

SEQ ID NO: 16359 - RNA, 22 nt, synthetic construct
  source 1..22: mol_type = other RNA
agaccagcctggccaacatggc

SEQ ID NO: 16360 - RNA, 22 nt, synthetic construct
  source 1..22: mol_type = other RNA
gagaccagcctggccaacatgg

SEQ ID NO: 16361 - RNA, 22 nt, synthetic construct
  source 1..22: mol_type = other RNA
ggaggccgaggcaggtggatca

SEQ ID NO: 16362 - RNA, 22 nt, synthetic construct
  source 1..22: mol_type = other RNA
gccgggcatggtggctcacgcc

SEQ ID NO: 16363 - RNA, 22 nt, synthetic construct
  source 1..22: mol_type = other RNA
cacccctgcactacaacctggg

SEQ ID NO: 16364 - RNA, 22 nt, synthetic construct
  source 1..22: mol_type = other RNA
gcttcagtccaggtagtcgagg

SEQ ID NO: 16365 - RNA, 22 nt, synthetic construct
  source 1..22: mol_type = other RNA
acaaggctcaggagggtatagg

SEQ ID NO: 16366 - RNA, 22 nt, synthetic construct
  source 1..22: mol_type = other RNA
taaaacagtgatcatgctggga

SEQ ID NO: 16367 - RNA, 22 nt, synthetic construct
  source 1..22: mol_type = other RNA
catagcaagaagtaagcaccta

SEQ ID NO: 16368 - RNA, 22 nt, synthetic construct
  source 1..22: mol_type = other RNA
tttgcatagcaagaagtaagca

SEQ ID NO: 16369 - RNA, 22 nt, synthetic construct
  source 1..22: mol_type = other RNA
ctttgcatagcaagaagtaagc

SEQ ID NO: 16370 - RNA, 22 nt, synthetic construct
  source 1..22: mol_type = other RNA
cttctgagtttctttgcatagc

SEQ ID NO: 16371 - RNA, 22 nt, synthetic construct
  source 1..22: mol_type = other RNA
gcttctgagtttctttgcatag

SEQ ID NO: 16372 - RNA, 22 nt, synthetic construct
  source 1..22: mol_type = other RNA
tgcttctgagtttctttgcata

SEQ ID NO: 16373 - RNA, 22 nt, synthetic construct
  source 1..22: mol_type = other RNA
ttgcttctgagtttctttgcat

SEQ ID NO: 16374 - RNA, 22 nt, synthetic construct
  source 1..22: mol_type = other RNA
tatttttgcttctgagtttctt

SEQ ID NO: 16375 - RNA, 22 nt, synthetic construct
  source 1..22: mol_type = other RNA
tgaaccagacagattctatttt

SEQ ID NO: 16376 - RNA, 22 nt, synthetic construct
  source 1..22: mol_type = other RNA
gcacaattatgaaccagacaga

SEQ ID NO: 16377 - RNA, 22 nt, synthetic construct
  source 1..22: mol_type = other RNA
agcacaattatgaaccagacag

SEQ ID NO: 16378 - RNA, 22 nt, synthetic construct
  source 1..22: mol_type = other RNA
tagcacaattatgaaccagaca

SEQ ID NO: 16379 - RNA, 22 nt, synthetic construct
  source 1..22: mol_type = other RNA
ttagcacaattatgaaccagac

SEQ ID NO: 16380 - RNA, 22 nt, synthetic construct
  source 1..22: mol_type = other RNA
atacttgtatctctagttttta

SEQ ID NO: 16381 - RNA, 22 nt, synthetic construct
  source 1..22: mol_type = other RNA
ctactacgcaaagaaactcaaa

SEQ ID NO: 16382 - RNA, 22 nt, synthetic construct
  source 1..22: mol_type = other RNA
tgtatgtgcctaattcctacta

SEQ ID NO: 16383 - RNA, 22 nt, synthetic construct
  source 1..22: mol_type = other RNA
atgtatgtgcctaattcctact

SEQ ID NO: 16384 - RNA, 22 nt, synthetic construct
  source 1..22: mol_type = other RNA
tttatgtatgtgcctaattcct

SEQ ID NO: 16385 - RNA, 22 nt, synthetic construct
  source 1..22: mol_type = other RNA
atttatgtatgtgcctaattcc

SEQ ID NO: 16386 - RNA, 22 nt, synthetic construct
  source 1..22: mol_type = other RNA
tatttatgtatgtgcctaattc

SEQ ID NO: 16387 - RNA, 22 nt, synthetic construct
  source 1..22: mol_type = other RNA
caatattttatttatgtatgtg

SEQ ID NO: 16388 - RNA, 22 nt, synthetic construct
  source 1..22: mol_type = other RNA
acaatattttatttatgtatgt

SEQ ID NO: 16389 - RNA, 22 nt, synthetic construct
  source 1..22: mol_type = other RNA
tacaatattttatttatgtatg

SEQ ID NO: 16390 - RNA, 22 nt, synthetic construct
  source 1..22: mol_type = other RNA
cttcccagcatgaatcactgtt

SEQ ID NO: 16391 - RNA, 22 nt, synthetic construct
  source 1..22: mol_type = other RNA
ccttcccagcatgaatcactgt

SEQ ID NO: 16392 - RNA, 22 nt, synthetic construct
  source 1..22: mol_type = other RNA
gtttccttcccagcatgaatca

SEQ ID NO: 16393 - RNA, 22 nt, synthetic construct
  source 1..22: mol_type = other RNA
ccctagagcttcccacggaaga

SEQ ID NO: 16394 - RNA, 22 nt, synthetic construct
  source 1..22: mol_type = other RNA
cccctagagcttcccacggaag

SEQ ID NO: 16395 - RNA, 22 nt, synthetic construct
  source 1..22: mol_type = other RNA
ttcctagagtccttttccccta

SEQ ID NO: 16396 - RNA, 22 nt, synthetic construct
  source 1..22: mol_type = other RNA
tttcttcctagagtccttttcc

SEQ ID NO: 16397 - RNA, 22 nt, synthetic construct
  source 1..22: mol_type = other RNA
cacctgctgttctttcttccta

SEQ ID NO: 16398 - RNA, 22 nt, synthetic construct
  source 1..22: mol_type = other RNA
ccacttagggcctttgcacctg

SEQ ID NO: 16399 - RNA, 22 nt, synthetic construct
  source 1..22: mol_type = other RNA
cccacttagggcctttgcacct

SEQ ID NO: 16400 - RNA, 22 nt, synthetic construct
  source 1..22: mol_type = other RNA
actacacacagccacagtggcc

SEQ ID NO: 16401 - RNA, 22 nt, synthetic construct
  source 1..22: mol_type = other RNA
cccagcctctgtccctcattca

SEQ ID NO: 16402 - RNA, 22 nt, synthetic construct
  source 1..22: mol_type = other RNA
ccctgacctcccctacttccac

SEQ ID NO: 16403 - RNA, 22 nt, synthetic construct
  source 1..22: mol_type = other RNA
acactgaaaaactgcaaatacc

SEQ ID NO: 16404 - RNA, 22 nt, synthetic construct
  source 1..22: mol_type = other RNA
cattcacactgaaaaactgcaa

SEQ ID NO: 16405 - RNA, 22 nt, synthetic construct
  source 1..22: mol_type = other RNA
ccattcacactgaaaaactgca

SEQ ID NO: 16406 - RNA, 22 nt, synthetic construct
  source 1..22: mol_type = other RNA
aagaccagtctgggccacatgg

SEQ ID NO: 16407 - RNA, 22 nt, synthetic construct
  source 1..22: mol_type = other RNA
caagaccagtctgggccacatg

SEQ ID NO: 16408 - RNA, 22 nt, synthetic construct
  source 1..22: mol_type = other RNA
gaaggctgaggtgggtggatcg

SEQ ID NO: 16409 - RNA, 22 nt, synthetic construct
  source 1..22: mol_type = other RNA
ttaaagggtaaatcaggctggg

SEQ ID NO: 16410 - RNA, 22 nt, synthetic construct
  source 1..22: mol_type = other RNA
cttaaagggtaaatcaggctgg

SEQ ID NO: 16411 - RNA, 22 nt, synthetic construct
  source 1..22: mol_type = other RNA
catgaaatatgatgtttcttaa

SEQ ID NO: 16412 - RNA, 22 nt, synthetic construct
  source 1..22: mol_type = other RNA
gggtcttacaatggatggcatc

SEQ ID NO: 16413 - RNA, 22 nt, synthetic construct
  source 1..22: mol_type = other RNA
gcctcatattggggtcttacaa

SEQ ID NO: 16414 - RNA, 22 nt, synthetic construct
  source 1..22: mol_type = other RNA
ggcctcatattggggtcttaca

SEQ ID NO: 16415 - RNA, 22 nt, synthetic construct
  source 1..22: mol_type = other RNA
tggcctcatattggggtcttac

SEQ ID NO: 16416 - RNA, 22 nt, synthetic construct
  source 1..22: mol_type = other RNA
cattttggcctcatattggggt

SEQ ID NO: 16417 - RNA, 22 nt, synthetic construct
  source 1..22: mol_type = other RNA
gcattttggcctcatattgggg

SEQ ID NO: 16418 - RNA, 22 nt, synthetic construct
  source 1..22: mol_type = other RNA
agatcaggatgtgtcttataac

SEQ ID NO: 16419 - RNA, 22 nt, synthetic construct
  source 1..22: mol_type = other RNA
aatatcattgagatcaggatgt

SEQ ID NO: 16420 - RNA, 22 nt, synthetic construct
  source 1..22: mol_type = other RNA
gaatatcattgagatcaggatg

SEQ ID NO: 16421 - RNA, 22 nt, synthetic construct
  source 1..22: mol_type = other RNA
atcgatgccaagacatatatgt

SEQ ID NO: 16422 - RNA, 22 nt, synthetic construct
  source 1..22: mol_type = other RNA
catcgatgccaagacatatatg

SEQ ID NO: 16423 - RNA, 22 nt, synthetic construct
  source 1..22: mol_type = other RNA
caatctctgaaccctggagacc

SEQ ID NO: 16424 - RNA, 22 nt, synthetic construct
  source 1..22: mol_type = other RNA
gcaatctctgaaccctggagac

SEQ ID NO: 16425 - RNA, 22 nt, synthetic construct
  source 1..22: mol_type = other RNA
tgcaatctctgaaccctggaga

SEQ ID NO: 16426 - RNA, 22 nt, synthetic construct
  source 1..22: mol_type = other RNA
aggctaaatcaactcacatcac

SEQ ID NO: 16427 - RNA, 22 nt, synthetic construct
  source 1..22: mol_type = other RNA
cactgctgccaagtggattcag

SEQ ID NO: 16428 - RNA, 22 nt, synthetic construct
  source 1..22: mol_type = other RNA
acactgctgccaagtggattca

SEQ ID NO: 16429 - RNA, 22 nt, synthetic construct
  source 1..22: mol_type = other RNA
cagtgaactgagactgcactcc

SEQ ID NO: 16430 - RNA, 22 nt, synthetic construct
  source 1..22: mol_type = other RNA
cttgaactcgggaggcggagtt

SEQ ID NO: 16431 - RNA, 22 nt, synthetic construct
  source 1..22: mol_type = other RNA
gccgggtgtgatggcacatgcc

SEQ ID NO: 16432 - RNA, 22 nt, synthetic construct
  source 1..22: mol_type = other RNA
agaccagcctgaccaacatgga

SEQ ID NO: 16433 - RNA, 22 nt, synthetic construct
  source 1..22: mol_type = other RNA
gagaccagcctgaccaacatgg

SEQ ID NO: 16434 - RNA, 22 nt, synthetic construct
  source 1..22: mol_type = other RNA
gaggccgaggcgggtggatcac

SEQ ID NO: 16435 - RNA, 22 nt, synthetic construct
  source 1..22: mol_type = other RNA
agcctcagaactcccttgcagg

SEQ ID NO: 16436 - RNA, 22 nt, synthetic construct
  source 1..22: mol_type = other RNA
ccatgattcagcctcagaactc

SEQ ID NO: 16437 - RNA, 22 nt, synthetic construct
  source 1..22: mol_type = other RNA
agggccatgactttgccatgat

SEQ ID NO: 16438 - RNA, 22 nt, synthetic construct
  source 1..22: mol_type = other RNA
cagggccatgactttgccatga

SEQ ID NO: 16439 - RNA, 22 nt, synthetic construct
  source 1..22: mol_type = other RNA
acaggtcaggtgctgctgcggg

SEQ ID NO: 16440 - RNA, 22 nt, synthetic construct
  source 1..22: mol_type = other RNA
aacaggtcaggtgctgctgcgg

SEQ ID NO: 16441 - RNA, 22 nt, synthetic construct
  source 1..22: mol_type = other RNA
ctcgacaccaagcagcctttta

SEQ ID NO: 16442 - RNA, 22 nt, synthetic construct
  source 1..22: mol_type = other RNA
actcgacaccaagcagcctttt

SEQ ID NO: 16443 - RNA, 22 nt, synthetic construct
  source 1..22: mol_type = other RNA
gtagcagtgaaaatagcatgat

SEQ ID NO: 16444 - RNA, 22 nt, synthetic construct
  source 1..22: mol_type = other RNA
acaaccagcattagtagcagtg

SEQ ID NO: 16445 - RNA, 22 nt, synthetic construct
  source 1..22: mol_type = other RNA
tgcagcatattcacaaccagca

SEQ ID NO: 16446 - RNA, 22 nt, synthetic construct
  source 1..22: mol_type = other RNA
ctgcagcatattcacaaccagc

SEQ ID NO: 16447 - RNA, 22 nt, synthetic construct
  source 1..22: mol_type = other RNA
acatagagggtgtgaccagcac

SEQ ID NO: 16448 - RNA, 22 nt, synthetic construct
  source 1..22: mol_type = other RNA
gtgagggtcgcatgagttaaca

SEQ ID NO: 16449 - RNA, 22 nt, synthetic construct
  source 1..22: mol_type = other RNA
tgactacatcacaggaacattg

SEQ ID NO: 16450 - RNA, 22 nt, synthetic construct
  source 1..22: mol_type = other RNA
gctatggttctgactacatcac

SEQ ID NO: 16451 - RNA, 22 nt, synthetic construct
  source 1..22: mol_type = other RNA
gaacatgccttggtgcctagaa

SEQ ID NO: 16452 - RNA, 22 nt, synthetic construct
  source 1..22: mol_type = other RNA
agaacatgccttggtgcctaga

SEQ ID NO: 16453 - RNA, 22 nt, synthetic construct
  source 1..22: mol_type = other RNA
tggggaggagtaaatgaatcaa

SEQ ID NO: 16454 - RNA, 22 nt, synthetic construct
  source 1..22: mol_type = other RNA
cccatctgtaaaatgggcatga

SEQ ID NO: 16455 - RNA, 22 nt, synthetic construct
  source 1..22: mol_type = other RNA
gcccatctgtaaaatgggcatg

SEQ ID NO: 16456 - RNA, 22 nt, synthetic construct
  source 1..22: mol_type = other RNA
aaatcccagctatgcctcttac

SEQ ID NO: 16457 - RNA, 22 nt, synthetic construct
  source 1..22: mol_type = other RNA
ttgccttactgtgtggaaactg

SEQ ID NO: 16458 - RNA, 22 nt, synthetic construct
  source 1..22: mol_type = other RNA
cttgccttactgtgtggaaact

SEQ ID NO: 16459 - RNA, 22 nt, synthetic construct
  source 1..22: mol_type = other RNA
agaccacttctctgtggtcaaa

SEQ ID NO: 16460 - RNA, 22 nt, synthetic construct
  source 1..22: mol_type = other RNA
aagacaggcaaaccaagaccca

SEQ ID NO: 16461 - RNA, 22 nt, synthetic construct
  source 1..22: mol_type = other RNA
aaagacaggcaaaccaagaccc

SEQ ID NO: 16462 - RNA, 22 nt, synthetic construct
  source 1..22: mol_type = other RNA
taaagacaggcaaaccaagacc

SEQ ID NO: 16463 - RNA, 22 nt, synthetic construct
  source 1..22: mol_type = other RNA
ctgccccattttaaagacaggc

SEQ ID NO: 16464 - RNA, 22 nt, synthetic construct
  source 1..22: mol_type = other RNA
cttctaggatctcagtgtcccc

SEQ ID NO: 16465 - RNA, 22 nt, synthetic construct
  source 1..22: mol_type = other RNA
agggctgtggtgattgcttcta

SEQ ID NO: 16466 - RNA, 22 nt, synthetic construct
  source 1..22: mol_type = other RNA
tcttgttcagggctgtggtgat

SEQ ID NO: 16467 - RNA, 22 nt, synthetic construct
  source 1..22: mol_type = other RNA
tgtccccaggtcccactagttc

SEQ ID NO: 16468 - RNA, 22 nt, synthetic construct
  source 1..22: mol_type = other RNA
ctgtccccaggtcccactagtt

SEQ ID NO: 16469 - RNA, 22 nt, synthetic construct
  source 1..22: mol_type = other RNA
tagatatgaaaatagaggctag

SEQ ID NO: 16470 - RNA, 22 nt, synthetic construct
  source 1..22: mol_type = other RNA
ctagatatgaaaatagaggcta

SEQ ID NO: 16471 - RNA, 22 nt, synthetic construct
  source 1..22: mol_type = other RNA
tctagatatgaaaatagaggct

SEQ ID NO: 16472 - RNA, 22 nt, synthetic construct
  source 1..22: mol_type = other RNA
ccattttctagatatgaaaata

SEQ ID NO: 16473 - RNA, 22 nt, synthetic construct
  source 1..22: mol_type = other RNA
ggatggttcccattttctagat

SEQ ID NO: 16474 - RNA, 22 nt, synthetic construct
  source 1..22: mol_type = other RNA
tgccaagtacttacataggcca

SEQ ID NO: 16475 - RNA, 22 nt, synthetic construct
  source 1..22: mol_type = other RNA
cacaacagagcctggcattgtg

SEQ ID NO: 16476 - RNA, 22 nt, synthetic construct
  source 1..22: mol_type = other RNA
ttgcacaacagagcctggcatt

SEQ ID NO: 16477 - RNA, 22 nt, synthetic construct
  source 1..22: mol_type = other RNA
attgcacaacagagcctggcat

SEQ ID NO: 16478 - RNA, 22 nt, synthetic construct
  source 1..22: mol_type = other RNA
cagaaaaagcctggtcccacta

SEQ ID NO: 16479 - RNA, 22 nt, synthetic construct
  source 1..22: mol_type = other RNA
gaggcctgtgcatggtcagcct

SEQ ID NO: 16480 - RNA, 22 nt, synthetic construct
  source 1..22: mol_type = other RNA
tacaagctgtcggaaacagagg

SEQ ID NO: 16481 - RNA, 22 nt, synthetic construct
  source 1..22: mol_type = other RNA
ttgtacaagctgtcggaaacag

SEQ ID NO: 16482 - RNA, 22 nt, synthetic construct
  source 1..22: mol_type = other RNA
tactggacgctggcaagagaaa

SEQ ID NO: 16483 - RNA, 22 nt, synthetic construct
  source 1..22: mol_type = other RNA
cctggacttacgccagcgtctc

SEQ ID NO: 16484 - RNA, 22 nt, synthetic construct
  source 1..22: mol_type = other RNA
tccacccaccagggttgcctgg

SEQ ID NO: 16485 - RNA, 22 nt, synthetic construct
  source 1..22: mol_type = other RNA
ttctccacccaccagggttgcc

SEQ ID NO: 16486 - RNA, 22 nt, synthetic construct
  source 1..22: mol_type = other RNA
agctccggggtcacactgggcc

SEQ ID NO: 16487 - RNA, 22 nt, synthetic construct
  source 1..22: mol_type = other RNA
gagctccggggtcacactgggc

SEQ ID NO: 16488 - RNA, 22 nt, synthetic construct
  source 1..22: mol_type = other RNA
gtgaagggaagagcatgatttg

SEQ ID NO: 16489 - RNA, 22 nt, synthetic construct
  source 1..22: mol_type = other RNA
cagattggtgaagggaagagca

SEQ ID NO: 16490 - RNA, 22 nt, synthetic construct
  source 1..22: mol_type = other RNA
cagatgaagaagctgaagccag

SEQ ID NO: 16491 - RNA, 22 nt, synthetic construct
  source 1..22: mol_type = other RNA
ctgtccccactttacagatgaa

SEQ ID NO: 16492 - RNA, 22 nt, synthetic construct
  source 1..22: mol_type = other RNA
ttactgtccccactttacagat

SEQ ID NO: 16493 - RNA, 22 nt, synthetic construct
  source 1..22: mol_type = other RNA
agcctcacaaaacctcttgggt

SEQ ID NO: 16494 - RNA, 22 nt, synthetic construct
  source 1..22: mol_type = other RNA
aagcctcacaaaacctcttggg

SEQ ID NO: 16495 - RNA, 22 nt, synthetic construct
  source 1..22: mol_type = other RNA
gtttaagcctcacaaaacctct

SEQ ID NO: 16496 - RNA, 22 nt, synthetic construct
  source 1..22: mol_type = other RNA
tagggcttgattagtttaagcc

SEQ ID NO: 16497 - RNA, 22 nt, synthetic construct
  source 1..22: mol_type = other RNA
taagagctttgtagggcttgat

SEQ ID NO: 16498 - RNA, 22 nt, synthetic construct
  source 1..22: mol_type = other RNA
ttataagagctttgtagggctt

SEQ ID NO: 16499 - RNA, 22 nt, synthetic construct
  source 1..22: mol_type = other RNA
tgtgccagctactgttgttata

SEQ ID NO: 16500 - RNA, 22 nt, synthetic construct
  source 1..22: mol_type = other RNA
gtgtgccagctactgttgttat

SEQ ID NO: 16501 - RNA, 22 nt, synthetic construct
  source 1..22: mol_type = other RNA
tgtgtgccagctactgttgtta

SEQ ID NO: 16502 - RNA, 22 nt, synthetic construct
  source 1..22: mol_type = other RNA
ttgtgtgccagctactgttgtt

SEQ ID NO: 16503 - RNA, 22 nt, synthetic construct
  source 1..22: mol_type = other RNA
gcatttttgtgtgccagctact

SEQ ID NO: 16504 - RNA, 22 nt, synthetic construct
  source 1..22: mol_type = other RNA
ttggcatttttgtgtgccagct

SEQ ID NO: 16505 - RNA, 22 nt, synthetic construct
  source 1..22: mol_type = other RNA
attggcatttttgtgtgccagc

SEQ ID NO: 16506 - RNA, 22 nt, synthetic construct
  source 1..22: mol_type = other RNA
agcctaatatagcatttattgg

SEQ ID NO: 16507 - RNA, 22 nt, synthetic construct
  source 1..22: mol_type = other RNA
atatggttcagcctaatatagc

SEQ ID NO: 16508 - RNA, 22 nt, synthetic construct
  source 1..22: mol_type = other RNA
catatggttcagcctaatatag

SEQ ID NO: 16509 - RNA, 22 nt, synthetic construct
  source 1..22: mol_type = other RNA
caggtcaaaaatgggtggatgt

SEQ ID NO: 16510 - RNA, 22 nt, synthetic construct
  source 1..22: mol_type = other RNA
acaggtcaaaaatgggtggatg

SEQ ID NO: 16511 - RNA, 22 nt, synthetic construct
  source 1..22: mol_type = other RNA
tacaggtcaaaaatgggtggat

SEQ ID NO: 16512 - RNA, 22 nt, synthetic construct
  source 1..22: mol_type = other RNA
ccaattttacaggtcaaaaatg

SEQ ID NO: 16513 - RNA, 22 nt, synthetic construct
  source 1..22: mol_type = other RNA
gacatcatggtgacttaataaa

SEQ ID NO: 16514 - RNA, 22 nt, synthetic construct
  source 1..22: mol_type = other RNA
aaagaatataaagtaaccagta

SEQ ID NO: 16515 - RNA, 22 nt, synthetic construct
  source 1..22: mol_type = other RNA
tggagataaaagtgctttgaaa

SEQ ID NO: 16516 - RNA, 22 nt, synthetic construct
  source 1..22: mol_type = other RNA
ctcatctgtaaaatgggtcttg

SEQ ID NO: 16517 - RNA, 22 nt, synthetic construct
  source 1..22: mol_type = other RNA
cctcatctgtaaaatgggtctt

SEQ ID NO: 16518 - RNA, 22 nt, synthetic construct
  source 1..22: mol_type = other RNA
tcctcatctgtaaaatgggtct

SEQ ID NO: 16519 - RNA, 22 nt, synthetic construct
  source 1..22: mol_type = other RNA
ttttcctcatctgtaaaatggg

SEQ ID NO: 16520 - RNA, 22 nt, synthetic construct
  source 1..22: mol_type = other RNA
actgctctgtgctttattttcc

SEQ ID NO: 16521 - RNA, 22 nt, synthetic construct
  source 1..22: mol_type = other RNA
gttaactgctctgtgctttatt

SEQ ID NO: 16522 - RNA, 22 nt, synthetic construct
  source 1..22: mol_type = other RNA
tgcagctgacttgctgtgtgac

SEQ ID NO: 16523 - RNA, 22 nt, synthetic construct
  source 1..22: mol_type = other RNA
tggttctgcagctgacttgctg

SEQ ID NO: 16524 - RNA, 22 nt, synthetic construct
  source 1..22: mol_type = other RNA
ctttatggttctgcagctgact

SEQ ID NO: 16525 - RNA, 22 nt, synthetic construct
  source 1..22: mol_type = other RNA
ccctggcaagataccgaccggt

SEQ ID NO: 16526 - RNA, 22 nt, synthetic construct
  source 1..22: mol_type = other RNA
cccctggcaagataccgaccgg

SEQ ID NO: 16527 - RNA, 22 nt, synthetic construct
  source 1..22: mol_type = other RNA
gggacttttcccctggcaagat

SEQ ID NO: 16528 - RNA, 22 nt, synthetic construct
  source 1..22: mol_type = other RNA
gaggagagagggcggcctgggg

SEQ ID NO: 16529 - RNA, 22 nt, synthetic construct
  source 1..22: mol_type = other RNA
ctggacactgaatgggatggtg

SEQ ID NO: 16530 - RNA, 22 nt, synthetic construct
  source 1..22: mol_type = other RNA
caggtgttcctggacactgaat

SEQ ID NO: 16531 - RNA, 22 nt, synthetic construct
  source 1..22: mol_type = other RNA
ttgcaggtgttcctggacactg

SEQ ID NO: 16532 - RNA, 22 nt, synthetic construct
  source 1..22: mol_type = other RNA
ccctgtccagagcacagctggg

SEQ ID NO: 16533 - RNA, 22 nt, synthetic construct
  source 1..22: mol_type = other RNA
aatgccaccttcacaaggacac

SEQ ID NO: 16534 - RNA, 22 nt, synthetic construct
  source 1..22: mol_type = other RNA
gaatgccaccttcacaaggaca

SEQ ID NO: 16535 - RNA, 22 nt, synthetic construct
  source 1..22: mol_type = other RNA
tgaatgccaccttcacaaggac

SEQ ID NO: 16536 - RNA, 22 nt, synthetic construct
  source 1..22: mol_type = other RNA
ttgaatgccaccttcacaagga

SEQ ID NO: 16537 - RNA, 22 nt, synthetic construct
  source 1..22: mol_type = other RNA
tttgaatgccaccttcacaagg

SEQ ID NO: 16538 - RNA, 22 nt, synthetic construct
  source 1..22: mol_type = other RNA
ctgtcccctgatctctaagcct

SEQ ID NO: 16539 - RNA, 22 nt, synthetic construct
  source 1..22: mol_type = other RNA
atctgagacaaacccggagcat

SEQ ID NO: 16540 - RNA, 22 nt, synthetic construct
  source 1..22: mol_type = other RNA
ggcaggacactctaggaggggc

SEQ ID NO: 16541 - RNA, 22 nt, synthetic construct
  source 1..22: mol_type = other RNA
aggcaggacactctaggagggg

SEQ ID NO: 16542 - RNA, 22 nt, synthetic construct
  source 1..22: mol_type = other RNA
cgcagccgggcaggggccaacc

SEQ ID NO: 16543 - RNA, 22 nt, synthetic construct
  source 1..22: mol_type = other RNA
attccgcagccgggcaggggcc

SEQ ID NO: 16544 - RNA, 22 nt, synthetic construct
  source 1..22: mol_type = other RNA
tccccagggtggcaggggcctg

SEQ ID NO: 16545 - RNA, 22 nt, synthetic construct
  source 1..22: mol_type = other RNA
cagtgaacccagatcgcaccac

SEQ ID NO: 16546 - RNA, 22 nt, synthetic construct
  source 1..22: mol_type = other RNA
gccagacatgatggtgggtgcc

SEQ ID NO: 16547 - RNA, 22 nt, synthetic construct
  source 1..22: mol_type = other RNA
agaccagcctggccaacatggc

SEQ ID NO: 16548 - RNA, 22 nt, synthetic construct
  source 1..22: mol_type = other RNA
gagaccagcctggccaacatgg

SEQ ID NO: 16549 - RNA, 22 nt, synthetic construct
  source 1..22: mol_type = other RNA
ggaggctgaggtgggtggatca

SEQ ID NO: 16550 - RNA, 22 nt, synthetic construct
  source 1..22: mol_type = other RNA
tctgtggcccggtgcagtggct

SEQ ID NO: 16551 - RNA, 22 nt, synthetic construct
  source 1..22: mol_type = other RNA
cccatcagtgtcttctgagtgc

SEQ ID NO: 16552 - RNA, 22 nt, synthetic construct
  source 1..22: mol_type = other RNA
gcaggctgggggttgcccatca

SEQ ID NO: 16553 - RNA, 22 nt, synthetic construct
  source 1..22: mol_type = other RNA
caatctggggaattagcaggct

SEQ ID NO: 16554 - RNA, 22 nt, synthetic construct
  source 1..22: mol_type = other RNA
agtcccatagacaaaagcagct

SEQ ID NO: 16555 - RNA, 22 nt, synthetic construct
  source 1..22: mol_type = other RNA
gccaacaatgtcagtgcattga

SEQ ID NO: 16556 - RNA, 22 nt, synthetic construct
  source 1..22: mol_type = other RNA
gctttggccaacaatgtcagtg

SEQ ID NO: 16557 - RNA, 22 nt, synthetic construct
  source 1..22: mol_type = other RNA
cctgctaagggctggtgcatct

SEQ ID NO: 16558 - RNA, 22 nt, synthetic construct
  source 1..22: mol_type = other RNA
ccctgctaagggctggtgcatc

SEQ ID NO: 16559 - RNA, 22 nt, synthetic construct
  source 1..22: mol_type = other RNA
gctgtttccctgctaagggctg

SEQ ID NO: 16560 - RNA, 22 nt, synthetic construct
  source 1..22: mol_type = other RNA
gtgtcccattagctgtttccct

SEQ ID NO: 16561 - RNA, 22 nt, synthetic construct
  source 1..22: mol_type = other RNA
ccctctcaccgccccattagtg

SEQ ID NO: 16562 - RNA, 22 nt, synthetic construct
  source 1..22: mol_type = other RNA
taatgtagtgaaaaaagacaca

SEQ ID NO: 16563 - RNA, 22 nt, synthetic construct
  source 1..22: mol_type = other RNA
ataatgtagtgaaaaaagacac

SEQ ID NO: 16564 - RNA, 22 nt, synthetic construct
  source 1..22: mol_type = other RNA
aagagacatttataatgtagtg

SEQ ID NO: 16565 - RNA, 22 nt, synthetic construct
  source 1..22: mol_type = other RNA
gataaccagagcagtgggtacc

SEQ ID NO: 16566 - RNA, 22 nt, synthetic construct
  source 1..22: mol_type = other RNA
catattagataaccagagcagt

SEQ ID NO: 16567 - RNA, 22 nt, synthetic construct
  source 1..22: mol_type = other RNA
gggtggcttgttacatattaga

SEQ ID NO: 16568 - RNA, 22 nt, synthetic construct
  source 1..22: mol_type = other RNA
ggggtggcttgttacatattag

SEQ ID NO: 16569 - RNA, 22 nt, synthetic construct
  source 1..22: mol_type = other RNA
agccactatgatttggggtggc

SEQ ID NO: 16570 - RNA, 22 nt, synthetic construct
  source 1..22: mol_type = other RNA
aagccactatgatttggggtgg

SEQ ID NO: 16571 - RNA, 22 nt, synthetic construct
  source 1..22: mol_type = other RNA
taagccactatgatttggggtg

SEQ ID NO: 16572 - RNA, 22 nt, synthetic construct
  source 1..22: mol_type = other RNA
ttttaagccactatgatttggg

SEQ ID NO: 16573 - RNA, 22 nt, synthetic construct
  source 1..22: mol_type = other RNA
cctgtcagacgtacagaagaat

SEQ ID NO: 16574 - RNA, 22 nt, synthetic construct
  source 1..22: mol_type = other RNA
cgtagtggcactgaggccccca

SEQ ID NO: 16575 - RNA, 22 nt, synthetic construct
  source 1..22: mol_type = other RNA
ggacaccctccaacccagccac

SEQ ID NO: 16576 - RNA, 22 nt, synthetic construct
  source 1..22: mol_type = other RNA
gggacaccctccaacccagcca

SEQ ID NO: 16577 - RNA, 22 nt, synthetic construct
  source 1..22: mol_type = other RNA
tgggacaccctccaacccagcc

SEQ ID NO: 16578 - RNA, 22 nt, synthetic construct
  source 1..22: mol_type = other RNA
tttttgggacaccctccaaccc

SEQ ID NO: 16579 - RNA, 22 nt, synthetic construct
  source 1..22: mol_type = other RNA
tgaaaagtggtctctctctatc

SEQ ID NO: 16580 - RNA, 22 nt, synthetic construct
  source 1..22: mol_type = other RNA
cagactgggcgacagagtgaga

SEQ ID NO: 16581 - RNA, 22 nt, synthetic construct
  source 1..22: mol_type = other RNA
aggctgcagtgagccgtgatca

SEQ ID NO: 16582 - RNA, 22 nt, synthetic construct
  source 1..22: mol_type = other RNA
gggaggctgaggtgggaggatc

SEQ ID NO: 16583 - RNA, 22 nt, synthetic construct
  source 1..22: mol_type = other RNA
actgggcttggtgactcacacc

SEQ ID NO: 16584 - RNA, 22 nt, synthetic construct
  source 1..22: mol_type = other RNA
aagacctgcctgggcaacatag

SEQ ID NO: 16585 - RNA, 22 nt, synthetic construct
  source 1..22: mol_type = other RNA
ggaggctgaggcaggagaatca

SEQ ID NO: 16586 - RNA, 22 nt, synthetic construct
  source 1..22: mol_type = other RNA
acacctgtaatcccagcacttt

SEQ ID NO: 16587 - RNA, 22 nt, synthetic construct
  source 1..22: mol_type = other RNA
ggaagccacaaagaaaagtcct

SEQ ID NO: 16588 - RNA, 22 nt, synthetic construct
  source 1..22: mol_type = other RNA
aggaagccacaaagaaaagtcc

SEQ ID NO: 16589 - RNA, 22 nt, synthetic construct
  source 1..22: mol_type = other RNA
taggaagccacaaagaaaagtc

SEQ ID NO: 16590 - RNA, 22 nt, synthetic construct
  source 1..22: mol_type = other RNA
cactgaattttaggaagccaca

SEQ ID NO: 16591 - RNA, 22 nt, synthetic construct
  source 1..22: mol_type = other RNA
ccactgaattttaggaagccac

SEQ ID NO: 16592 - RNA, 22 nt, synthetic construct
  source 1..22: mol_type = other RNA
tccactgaattttaggaagcca

SEQ ID NO: 16593 - RNA, 22 nt, synthetic construct
  source 1..22: mol_type = other RNA
attttccactgaattttaggaa

SEQ ID NO: 16594 - RNA, 22 nt, synthetic construct
  source 1..22: mol_type = other RNA
tcatccccaaacaattaatttt

SEQ ID NO: 16595 - RNA, 22 nt, synthetic construct
  source 1..22: mol_type = other RNA
gtgcttcaacctttctcatccc

SEQ ID NO: 16596 - RNA, 22 nt, synthetic construct
  source 1..22: mol_type = other RNA
ggtgcttcaacctttctcatcc

SEQ ID NO: 16597 - RNA, 22 nt, synthetic construct
  source 1..22: mol_type = other RNA
cccttggtaagcttttggtgct

SEQ ID NO: 16598 - RNA, 22 nt, synthetic construct
  source 1..22: mol_type = other RNA
ggactccctgcagccaaggtgg

SEQ ID NO: 16599 - RNA, 22 nt, synthetic construct
  source 1..22: mol_type = other RNA
gggcttctgagcagactatgcc

SEQ ID NO: 16600 - RNA, 22 nt, synthetic construct
  source 1..22: mol_type = other RNA
ctcagaccctcttgacacccag

SEQ ID NO: 16601 - RNA, 22 nt, synthetic construct
  source 1..22: mol_type = other RNA
gaggcaggaggtgcttgcctgt

SEQ ID NO: 16602 - RNA, 22 nt, synthetic construct
  source 1..22: mol_type = other RNA
cagccagttcgaggcaggaggt

SEQ ID NO: 16603 - RNA, 22 nt, synthetic construct
  source 1..22: mol_type = other RNA
caagctgaacctggatggcagc

SEQ ID NO: 16604 - RNA, 22 nt, synthetic construct
  source 1..22: mol_type = other RNA
acaagctgaacctggatggcag

SEQ ID NO: 16605 - RNA, 22 nt, synthetic construct
  source 1..22: mol_type = other RNA
atcatcacacagaccaaaagca

SEQ ID NO: 16606 - RNA, 22 nt, synthetic construct
  source 1..22: mol_type = other RNA
catcatcacacagaccaaaagc

SEQ ID NO: 16607 - RNA, 22 nt, synthetic construct
  source 1..22: mol_type = other RNA
ataactgcaggctctgacctca

SEQ ID NO: 16608 - RNA, 22 nt, synthetic construct
  source 1..22: mol_type = other RNA
gtgttaataactgcaggctctg

SEQ ID NO: 16609 - RNA, 22 nt, synthetic construct
  source 1..22: mol_type = other RNA
acaaatcgttagtgttaataac

SEQ ID NO: 16610 - RNA, 22 nt, synthetic construct
  source 1..22: mol_type = other RNA
aataaaataataaacagtagct

SEQ ID NO: 16611 - RNA, 22 nt, synthetic construct
  source 1..22: mol_type = other RNA
cagtgagccgagatcatgccac

SEQ ID NO: 16612 - RNA, 22 nt, synthetic construct
  source 1..22: mol_type = other RNA
cttgaacccaggaggcagaggt

SEQ ID NO: 16613 - RNA, 22 nt, synthetic construct
  source 1..22: mol_type = other RNA
gccaggcgtggtggtgcatgcc

SEQ ID NO: 16614 - RNA, 22 nt, synthetic construct
  source 1..22: mol_type = other RNA
ccagcctggccaacatggtgaa

SEQ ID NO: 16615 - RNA, 22 nt, synthetic construct
  source 1..22: mol_type = other RNA
ggaggccaaggcaggcagatta

SEQ ID NO: 16616 - RNA, 22 nt, synthetic construct
  source 1..22: mol_type = other RNA
aataaacagtagtggccgggtg

SEQ ID NO: 16617 - RNA, 22 nt, synthetic construct
  source 1..22: mol_type = other RNA
catgtatctgctcattaaataa

SEQ ID NO: 16618 - RNA, 22 nt, synthetic construct
  source 1..22: mol_type = other RNA
ccttgcactgtgataagggctt

SEQ ID NO: 16619 - RNA, 22 nt, synthetic construct
  source 1..22: mol_type = other RNA
cccttgcactgtgataagggct

SEQ ID NO: 16620 - RNA, 22 nt, synthetic construct
  source 1..22: mol_type = other RNA
aatttcccttgcactgtgataa

SEQ ID NO: 16621 - RNA, 22 nt, synthetic construct
  source 1..22: mol_type = other RNA
tgagcgctttgaatttcccttg

SEQ ID NO: 16622 - RNA, 22 nt, synthetic construct
  source 1..22: mol_type = other RNA
agctaatactttctgagcgctt

SEQ ID NO: 16623 - RNA, 22 nt, synthetic construct
  source 1..22: mol_type = other RNA
gcacagtgtctggcacacagtc

SEQ ID NO: 16624 - RNA, 22 nt, synthetic construct
  source 1..22: mol_type = other RNA
agcacagtgtctggcacacagt

SEQ ID NO: 16625 - RNA, 22 nt, synthetic construct
  source 1..22: mol_type = other RNA
tagagtctctgccacttgcccc

SEQ ID NO: 16626 - RNA, 22 nt, synthetic construct
  source 1..22: mol_type = other RNA
agcccaggcaatctcgttctag

SEQ ID NO: 16627 - RNA, 22 nt, synthetic construct
  source 1..22: mol_type = other RNA
caaatgaggagactgaggcaca

SEQ ID NO: 16628 - RNA, 22 nt, synthetic construct
  source 1..22: mol_type = other RNA
acaaatgaggagactgaggcac

SEQ ID NO: 16629 - RNA, 22 nt, synthetic construct
  source 1..22: mol_type = other RNA
tacaaatgaggagactgaggca

SEQ ID NO: 16630 - RNA, 22 nt, synthetic construct
  source 1..22: mol_type = other RNA
tgcccattttacaaatgaggag

SEQ ID NO: 16631 - RNA, 22 nt, synthetic construct
  source 1..22: mol_type = other RNA
gctcaccacaccttcacataat

SEQ ID NO: 16632 - RNA, 22 nt, synthetic construct
  source 1..22: mol_type = other RNA
ttaacgtattagctcaccacac

SEQ ID NO: 16633 - RNA, 22 nt, synthetic construct
  source 1..22: mol_type = other RNA
agctccaattcttaacgtatta

SEQ ID NO: 16634 - RNA, 22 nt, synthetic construct
  source 1..22: mol_type = other RNA
ttgagctccaattcttaacgta

SEQ ID NO: 16635 - RNA, 22 nt, synthetic construct
  source 1..22: mol_type = other RNA
cagccagaggcaagaatgaaac

SEQ ID NO: 16636 - RNA, 22 nt, synthetic construct
  source 1..22: mol_type = other RNA
gagaatggggcaagtcccgaag

SEQ ID NO: 16637 - RNA, 22 nt, synthetic construct
  source 1..22: mol_type = other RNA
ccgccctcctggagctcatgtc

SEQ ID NO: 16638 - RNA, 22 nt, synthetic construct
  source 1..22: mol_type = other RNA
cccgccctcctggagctcatgt

SEQ ID NO: 16639 - RNA, 22 nt, synthetic construct
  source 1..22: mol_type = other RNA
tacacaggcgccttgctgggta

SEQ ID NO: 16640 - RNA, 22 nt, synthetic construct
  source 1..22: mol_type = other RNA
agcacctattatacacaggcgc

SEQ ID NO: 16641 - RNA, 22 nt, synthetic construct
  source 1..22: mol_type = other RNA
ttgagcacctattatacacagg

SEQ ID NO: 16642 - RNA, 22 nt, synthetic construct
  source 1..22: mol_type = other RNA
tgttattgagcacctattatac

SEQ ID NO: 16643 - RNA, 22 nt, synthetic construct
  source 1..22: mol_type = other RNA
atgttattgagcacctattata

SEQ ID NO: 16644 - RNA, 22 nt, synthetic construct
  source 1..22: mol_type = other RNA
tatgttattgagcacctattat

SEQ ID NO: 16645 - RNA, 22 nt, synthetic construct
  source 1..22: mol_type = other RNA
attttatgttattgagcaccta

SEQ ID NO: 16646 - RNA, 22 nt, synthetic construct
  source 1..22: mol_type = other RNA
ttcattttatgttattgagcac

SEQ ID NO: 16647 - RNA, 22 nt, synthetic construct
  source 1..22: mol_type = other RNA
gttcattttatgttattgagca

SEQ ID NO: 16648 - RNA, 22 nt, synthetic construct
  source 1..22: mol_type = other RNA
tttgttcattttatgttattga

SEQ ID NO: 16649 - RNA, 22 nt, synthetic construct
  source 1..22: mol_type = other RNA
ggtgaggattatttgttcattt

SEQ ID NO: 16650 - RNA, 22 nt, synthetic construct
  source 1..22: mol_type = other RNA
cagaatgaatgaaaccgttagg

SEQ ID NO: 16651 - RNA, 22 nt, synthetic construct
  source 1..22: mol_type = other RNA
gcagaatgaatgaaaccgttag

SEQ ID NO: 16652 - RNA, 22 nt, synthetic construct
  source 1..22: mol_type = other RNA
atgactgtgctgtcagtatgta

SEQ ID NO: 16653 - RNA, 22 nt, synthetic construct
  source 1..22: mol_type = other RNA
ctaaaatataagactcaccagg

SEQ ID NO: 16654 - RNA, 22 nt, synthetic construct
  source 1..22: mol_type = other RNA
gctaaaatataagactcaccag

SEQ ID NO: 16655 - RNA, 22 nt, synthetic construct
  source 1..22: mol_type = other RNA
atttgctaaaatataagactca

SEQ ID NO: 16656 - RNA, 22 nt, synthetic construct
  source 1..22: mol_type = other RNA
aatttgctaaaatataagactc

SEQ ID NO: 16657 - RNA, 22 nt, synthetic construct
  source 1..22: mol_type = other RNA
taatttgctaaaatataagact

SEQ ID NO: 16658 - RNA, 22 nt, synthetic construct
  source 1..22: mol_type = other RNA
ttaatttgctaaaatataagac

SEQ ID NO: 16659 - RNA, 22 nt, synthetic construct
  source 1..22: mol_type = other RNA
tttaatttgctaaaatataaga

SEQ ID NO: 16660 - RNA, 22 nt, synthetic construct
  source 1..22: mol_type = other RNA
ttttaatttgctaaaatataag

SEQ ID NO: 16661 - RNA, 22 nt, synthetic construct
  source 1..22: mol_type = other RNA
tgcagtgtacagactggccaac

SEQ ID NO: 16662 - RNA, 22 nt, synthetic construct
  source 1..22: mol_type = other RNA
ccccttgtcccaggtgcctttg

SEQ ID NO: 16663 - RNA, 22 nt, synthetic construct
  source 1..22: mol_type = other RNA
cagcccccatgttcccccttgt

SEQ ID NO: 16664 - RNA, 22 nt, synthetic construct
  source 1..22: mol_type = other RNA
gcagcccccatgttcccccttg

SEQ ID NO: 16665 - RNA, 22 nt, synthetic construct
  source 1..22: mol_type = other RNA
gcaagcagaacccagactggtt

SEQ ID NO: 16666 - RNA, 22 nt, synthetic construct
  source 1..22: mol_type = other RNA
ggcaagcagaacccagactggt

SEQ ID NO: 16667 - RNA, 22 nt, synthetic construct
  source 1..22: mol_type = other RNA
aaaggctccacaccaggactcc

SEQ ID NO: 16668 - RNA, 22 nt, synthetic construct
  source 1..22: mol_type = other RNA
actacgaaaagatgcccctctg

SEQ ID NO: 16669 - RNA, 22 nt, synthetic construct
  source 1..22: mol_type = other RNA
tccacatcttacgatgactgtg

SEQ ID NO: 16670 - RNA, 22 nt, synthetic construct
  source 1..22: mol_type = other RNA
atccacatcttacgatgactgt

SEQ ID NO: 16671 - RNA, 22 nt, synthetic construct
  source 1..22: mol_type = other RNA
taggagtgtgactataagtatc

SEQ ID NO: 16672 - RNA, 22 nt, synthetic construct
  source 1..22: mol_type = other RNA
ctttataggagtgtgactataa

SEQ ID NO: 16673 - RNA, 22 nt, synthetic construct
  source 1..22: mol_type = other RNA
aggggcacttccggcacactgt

SEQ ID NO: 16674 - RNA, 22 nt, synthetic construct
  source 1..22: mol_type = other RNA
ccacctgacaaatggggttcag

SEQ ID NO: 16675 - RNA, 22 nt, synthetic construct
  source 1..22: mol_type = other RNA
ctccgagcagcgctttaccacc

SEQ ID NO: 16676 - RNA, 22 nt, synthetic construct
  source 1..22: mol_type = other RNA
cactatcatgccctgattcctc

SEQ ID NO: 16677 - RNA, 22 nt, synthetic construct
  source 1..22: mol_type = other RNA
gaaggtgcgtggacttacaatc

SEQ ID NO: 16678 - RNA, 22 nt, synthetic construct
  source 1..22: mol_type = other RNA
ggaaggtgcgtggacttacaat

SEQ ID NO: 16679 - RNA, 22 nt, synthetic construct
  source 1..22: mol_type = other RNA
tatgcagagagaggcctgcgag

SEQ ID NO: 16680 - RNA, 22 nt, synthetic construct
  source 1..22: mol_type = other RNA
gtatgcagagagaggcctgcga

SEQ ID NO: 16681 - RNA, 22 nt, synthetic construct
  source 1..22: mol_type = other RNA
agagccccagggaaaaaggtga

SEQ ID NO: 16682 - RNA, 22 nt, synthetic construct
  source 1..22: mol_type = other RNA
gagagccccagggaaaaaggtg

SEQ ID NO: 16683 - RNA, 22 nt, synthetic construct
  source 1..22: mol_type = other RNA
gagcaccacttgccctcaagtg

SEQ ID NO: 16684 - RNA, 22 nt, synthetic construct
  source 1..22: mol_type = other RNA
tacaggcgaggagactgaggtg

SEQ ID NO: 16685 - RNA, 22 nt, synthetic construct
  source 1..22: mol_type = other RNA
acccctttctacaggcgaggag

SEQ ID NO: 16686 - RNA, 22 nt, synthetic construct
  source 1..22: mol_type = other RNA
aaacgattgacccctttctaca

SEQ ID NO: 16687 - RNA, 22 nt, synthetic construct
  source 1..22: mol_type = other RNA
aaagcaccttcacatacacacc

SEQ ID NO: 16688 - RNA, 22 nt, synthetic construct
  source 1..22: mol_type = other RNA
caaagcaccttcacatacacac

SEQ ID NO: 16689 - RNA, 22 nt, synthetic construct
  source 1..22: mol_type = other RNA
cagagcacttgatttcaaagca

SEQ ID NO: 16690 - RNA, 22 nt, synthetic construct
  source 1..22: mol_type = other RNA
gcagagcacttgatttcaaagc

SEQ ID NO: 16691 - RNA, 22 nt, synthetic construct
  source 1..22: mol_type = other RNA
tctccagtttgcagagcacttg

SEQ ID NO: 16692 - RNA, 22 nt, synthetic construct
  source 1..22: mol_type = other RNA
acggaatacaagcagtaattct

SEQ ID NO: 16693 - RNA, 22 nt, synthetic construct
  source 1..22: mol_type = other RNA
cacggaatacaagcagtaattc

SEQ ID NO: 16694 - RNA, 22 nt, synthetic construct
  source 1..22: mol_type = other RNA
ggagcttgtagtttcacggaat

SEQ ID NO: 16695 - RNA, 22 nt, synthetic construct
  source 1..22: mol_type = other RNA
aatgagtggaattgggagcttg

SEQ ID NO: 16696 - RNA, 22 nt, synthetic construct
  source 1..22: mol_type = other RNA
cagcctgggcaacagagcaaga

SEQ ID NO: 16697 - RNA, 22 nt, synthetic construct
  source 1..22: mol_type = other RNA
agatcatgccactgcattccag

SEQ ID NO: 16698 - RNA, 22 nt, synthetic construct
  source 1..22: mol_type = other RNA
cagtgagttgagatcatgccac

SEQ ID NO: 16699 - RNA, 22 nt, synthetic construct
  source 1..22: mol_type = other RNA
cttgaaaccagggaggcagagg

SEQ ID NO: 16700 - RNA, 22 nt, synthetic construct
  source 1..22: mol_type = other RNA
gccaggcatagtggcgcacact

SEQ ID NO: 16701 - RNA, 22 nt, synthetic construct
  source 1..22: mol_type = other RNA
gagaccagcctggccaccacgg

SEQ ID NO: 16702 - RNA, 22 nt, synthetic construct
  source 1..22: mol_type = other RNA
ggagttcgagaccagcctggcc

SEQ ID NO: 16703 - RNA, 22 nt, synthetic construct
  source 1..22: mol_type = other RNA
gaaggccgaggcgggcagatca

SEQ ID NO: 16704 - RNA, 22 nt, synthetic construct
  source 1..22: mol_type = other RNA
aagataggggggaagggcttgg

SEQ ID NO: 16705 - RNA, 22 nt, synthetic construct
  source 1..22: mol_type = other RNA
agagagtctgccccagtcgggc

SEQ ID NO: 16706 - RNA, 22 nt, synthetic construct
  source 1..22: mol_type = other RNA
taggcagaaccttgtggctgac

SEQ ID NO: 16707 - RNA, 22 nt, synthetic construct
  source 1..22: mol_type = other RNA
gggaaaggagttctaggcagaa

SEQ ID NO: 16708 - RNA, 22 nt, synthetic construct
  source 1..22: mol_type = other RNA
agattcgggaaaggagttctag

SEQ ID NO: 16709 - RNA, 22 nt, synthetic construct
  source 1..22: mol_type = other RNA
actttgagattcgggaaaggag

SEQ ID NO: 16710 - RNA, 22 nt, synthetic construct
  source 1..22: mol_type = other RNA
aactttgagattcgggaaagga

SEQ ID NO: 16711 - RNA, 22 nt, synthetic construct
  source 1..22: mol_type = other RNA
taactttgagattcgggaaagg

SEQ ID NO: 16712 - RNA, 22 nt, synthetic construct
  source 1..22: mol_type = other RNA
ttaactttgagattcgggaaag

SEQ ID NO: 16713 - RNA, 22 nt, synthetic construct
  source 1..22: mol_type = other RNA
tttaactttgagattcgggaaa

SEQ ID NO: 16714 - RNA, 22 nt, synthetic construct
  source 1..22: mol_type = other RNA
ttttaactttgagattcgggaa

SEQ ID NO: 16715 - RNA, 22 nt, synthetic construct
  source 1..22: mol_type = other RNA
tttttaactttgagattcggga

SEQ ID NO: 16716 - RNA, 22 nt, synthetic construct
  source 1..22: mol_type = other RNA
aaaaaaaatgtatgcaactcca

SEQ ID NO: 16717 - RNA, 22 nt, synthetic construct
  source 1..22: mol_type = other RNA
gattaaaaaaaaatgtatgcaa

SEQ ID NO: 16718 - RNA, 22 nt, synthetic construct
  source 1..22: mol_type = other RNA
tgataaacctgtctaagcaata

SEQ ID NO: 16719 - RNA, 22 nt, synthetic construct
  source 1..22: mol_type = other RNA
tgcctacttaattctgataaac

SEQ ID NO: 16720 - RNA, 22 nt, synthetic construct
  source 1..22: mol_type = other RNA
tgaaagtatgagtgttgtgcct

SEQ ID NO: 16721 - RNA, 22 nt, synthetic construct
  source 1..22: mol_type = other RNA
ctgaaagtatgagtgttgtgcc

SEQ ID NO: 16722 - RNA, 22 nt, synthetic construct
  source 1..22: mol_type = other RNA
ctcccctggctggaaatgcttt

SEQ ID NO: 16723 - RNA, 22 nt, synthetic construct
  source 1..22: mol_type = other RNA
gcaaaacagacatcatgctggt

SEQ ID NO: 16724 - RNA, 22 nt, synthetic construct
  source 1..22: mol_type = other RNA
ttcagcaagttggcaaaacaga

SEQ ID NO: 16725 - RNA, 22 nt, synthetic construct
  source 1..22: mol_type = other RNA
ctcgttcttcagcaagttggca

SEQ ID NO: 16726 - RNA, 22 nt, synthetic construct
  source 1..22: mol_type = other RNA
aggttactcgttcttcagcaag

SEQ ID NO: 16727 - RNA, 22 nt, synthetic construct
  source 1..22: mol_type = other RNA
caggttactcgttcttcagcaa

SEQ ID NO: 16728 - RNA, 22 nt, synthetic construct
  source 1..22: mol_type = other RNA
tcgctccttcatttcaggttac

SEQ ID NO: 16729 - RNA, 22 nt, synthetic construct
  source 1..22: mol_type = other RNA
gggggctgagggtgggattctc

SEQ ID NO: 16730 - RNA, 22 nt, synthetic construct
  source 1..22: mol_type = other RNA
aggggtgactcagaagaaaaag

SEQ ID NO: 16731 - RNA, 22 nt, synthetic construct
  source 1..22: mol_type = other RNA
caggggtgactcagaagaaaaa

SEQ ID NO: 16732 - RNA, 22 nt, synthetic construct
  source 1..22: mol_type = other RNA
gcccgaggctggtcttagatgc

SEQ ID NO: 16733 - RNA, 22 nt, synthetic construct
  source 1..22: mol_type = other RNA
agcccgaggctggtcttagatg

SEQ ID NO: 16734 - RNA, 22 nt, synthetic construct
  source 1..22: mol_type = other RNA
agccttcaggccagctgggttt

SEQ ID NO: 16735 - RNA, 22 nt, synthetic construct
  source 1..22: mol_type = other RNA
atgtgagttgagccttcaggcc

SEQ ID NO: 16736 - RNA, 22 nt, synthetic construct
  source 1..22: mol_type = other RNA
gatgtgagttgagccttcaggc

SEQ ID NO: 16737 - RNA, 22 nt, synthetic construct
  source 1..22: mol_type = other RNA
cctccctgcacttcatcccgga

SEQ ID NO: 16738 - RNA, 22 nt, synthetic construct
  source 1..22: mol_type = other RNA
gcctccctgcacttcatcccgg

SEQ ID NO: 16739 - RNA, 22 nt, synthetic construct
  source 1..22: mol_type = other RNA
caggaacccagccagagtttgc

SEQ ID NO: 16740 - RNA, 22 nt, synthetic construct
  source 1..22: mol_type = other RNA
acaggaacccagccagagtttg

SEQ ID NO: 16741 - RNA, 22 nt, synthetic construct
  source 1..22: mol_type = other RNA
cagctgcgatggatgtttacag

SEQ ID NO: 16742 - RNA, 22 nt, synthetic construct
  source 1..22: mol_type = other RNA
gcagctgcgatggatgtttaca

SEQ ID NO: 16743 - RNA, 22 nt, synthetic construct
  source 1..22: mol_type = other RNA
tttgcagctgcgatggatgttt

SEQ ID NO: 16744 - RNA, 22 nt, synthetic construct
  source 1..22: mol_type = other RNA
ggaaggcacctgctcccacaga

SEQ ID NO: 16745 - RNA, 22 nt, synthetic construct
  source 1..22: mol_type = other RNA
ggactgagtgctgaggttggga

SEQ ID NO: 16746 - RNA, 22 nt, synthetic construct
  source 1..22: mol_type = other RNA
aacccaggagagtggaagagag

SEQ ID NO: 16747 - RNA, 22 nt, synthetic construct
  source 1..22: mol_type = other RNA
gaacccaggagagtggaagaga

SEQ ID NO: 16748 - RNA, 22 nt, synthetic construct
  source 1..22: mol_type = other RNA
ctgtttgaacccaggagagtgg

SEQ ID NO: 16749 - RNA, 22 nt, synthetic construct
  source 1..22: mol_type = other RNA
gacctgctcccctcaaaagctt

SEQ ID NO: 16750 - RNA, 22 nt, synthetic construct
  source 1..22: mol_type = other RNA
cttcttgttagacctgctcccc

SEQ ID NO: 16751 - RNA, 22 nt, synthetic construct
  source 1..22: mol_type = other RNA
ccttcttgttagacctgctccc

SEQ ID NO: 16752 - RNA, 22 nt, synthetic construct
  source 1..22: mol_type = other RNA
tccttcttgttagacctgctcc

SEQ ID NO: 16753 - RNA, 22 nt, synthetic construct
  source 1..22: mol_type = other RNA
gtccctgtccccagccaacctg

SEQ ID NO: 16754 - RNA, 22 nt, synthetic construct
  source 1..22: mol_type = other RNA
agggatggaggaagacttccct

SEQ ID NO: 16755 - RNA, 22 nt, synthetic construct
  source 1..22: mol_type = other RNA
gagggatggaggaagacttccc

SEQ ID NO: 16756 - RNA, 22 nt, synthetic construct
  source 1..22: mol_type = other RNA
cctaaatttgagggatggagga

SEQ ID NO: 16757 - RNA, 22 nt, synthetic construct
  source 1..22: mol_type = other RNA
agcctgagtctggggctcccag

SEQ ID NO: 16758 - RNA, 22 nt, synthetic construct
  source 1..22: mol_type = other RNA
cagcctgagtctggggctccca

SEQ ID NO: 16759 - RNA, 22 nt, synthetic construct
  source 1..22: mol_type = other RNA
tcagcctgagtctggggctccc

SEQ ID NO: 16760 - RNA, 22 nt, synthetic construct
  source 1..22: mol_type = other RNA
cagaaagacattttcagcctga

SEQ ID NO: 16761 - RNA, 22 nt, synthetic construct
  source 1..22: mol_type = other RNA
gcagaaagacattttcagcctg

SEQ ID NO: 16762 - RNA, 22 nt, synthetic construct
  source 1..22: mol_type = other RNA
tatttgcagaaagacattttca

SEQ ID NO: 16763 - RNA, 22 nt, synthetic construct
  source 1..22: mol_type = other RNA
atatttgcagaaagacattttc

SEQ ID NO: 16764 - RNA, 22 nt, synthetic construct
  source 1..22: mol_type = other RNA
tatatttgcagaaagacatttt

SEQ ID NO: 16765 - RNA, 22 nt, synthetic construct
  source 1..22: mol_type = other RNA
aaaagagttttatatttgcaga

SEQ ID NO: 16766 - RNA, 22 nt, synthetic construct
  source 1..22: mol_type = other RNA
attaaaaagagttttatatttg

SEQ ID NO: 16767 - RNA, 22 nt, synthetic construct
  source 1..22: mol_type = other RNA
ggcaaattcattaaaaagagtt

SEQ ID NO: 16768 - RNA, 22 nt, synthetic construct
  source 1..22: mol_type = other RNA
tccagcccagggtctctgagaa

SEQ ID NO: 16769 - RNA, 22 nt, synthetic construct
  source 1..22: mol_type = other RNA
cactggttctccagcccagggt

SEQ ID NO: 16770 - RNA, 22 nt, synthetic construct
  source 1..22: mol_type = other RNA
ccaagccctgcccactacccag

SEQ ID NO: 16771 - RNA, 22 nt, synthetic construct
  source 1..22: mol_type = other RNA
cgggcaaggtggaaggtgttgc

SEQ ID NO: 16772 - RNA, 22 nt, synthetic construct
  source 1..22: mol_type = other RNA
ccgggcaaggtggaaggtgttg

SEQ ID NO: 16773 - RNA, 22 nt, synthetic construct
  source 1..22: mol_type = other RNA
tccgggcaaggtggaaggtgtt

SEQ ID NO: 16774 - RNA, 22 nt, synthetic construct
  source 1..22: mol_type = other RNA
ttccgggcaaggtggaaggtgt

SEQ ID NO: 16775 - RNA, 22 nt, synthetic construct
  source 1..22: mol_type = other RNA
caaagcatttttccgggcaagg

SEQ ID NO: 16776 - RNA, 22 nt, synthetic construct
  source 1..22: mol_type = other RNA
ccttcctgtaggttgcaaagca

SEQ ID NO: 16777 - RNA, 22 nt, synthetic construct
  source 1..22: mol_type = other RNA
ggcatgggaacacgaggtgcta

SEQ ID NO: 16778 - RNA, 22 nt, synthetic construct
  source 1..22: mol_type = other RNA
cggaaaggatagtgagctggga

SEQ ID NO: 16779 - RNA, 22 nt, synthetic construct
  source 1..22: mol_type = other RNA
gcggaaaggatagtgagctggg

SEQ ID NO: 16780 - RNA, 22 nt, synthetic construct
  source 1..22: mol_type = other RNA
agtgaagtttgcggaaaggata

SEQ ID NO: 16781 - RNA, 22 nt, synthetic construct
  source 1..22: mol_type = other RNA
tgcgagatgttcagtgaagttt

SEQ ID NO: 16782 - RNA, 22 nt, synthetic construct
  source 1..22: mol_type = other RNA
acatacaagttctgcgagatgt

SEQ ID NO: 16783 - RNA, 22 nt, synthetic construct
  source 1..22: mol_type = other RNA
aacatacaagttctgcgagatg

SEQ ID NO: 16784 - RNA, 22 nt, synthetic construct
  source 1..22: mol_type = other RNA
tcctaccccaaatgtcaatagc

SEQ ID NO: 16785 - RNA, 22 nt, synthetic construct
  source 1..22: mol_type = other RNA
gtggcctggagccagagatgct

SEQ ID NO: 16786 - RNA, 22 nt, synthetic construct
  source 1..22: mol_type = other RNA
agtggcctggagccagagatgc

SEQ ID NO: 16787 - RNA, 22 nt, synthetic construct
  source 1..22: mol_type = other RNA
cagtggccaggggtgctactgg

SEQ ID NO: 16788 - RNA, 22 nt, synthetic construct
  source 1..22: mol_type = other RNA
ttccagtggccaggggtgctac

SEQ ID NO: 16789 - RNA, 22 nt, synthetic construct
  source 1..22: mol_type = other RNA
gttgttccagtggccaggggtg

SEQ ID NO: 16790 - RNA, 22 nt, synthetic construct
  source 1..22: mol_type = other RNA
agttgttccagtggccaggggt

SEQ ID NO: 16791 - RNA, 22 nt, synthetic construct
  source 1..22: mol_type = other RNA
tagttgttccagtggccagggg

SEQ ID NO: 16792 - RNA, 22 nt, synthetic construct
  source 1..22: mol_type = other RNA
ttagttgttccagtggccaggg

SEQ ID NO: 16793 - RNA, 22 nt, synthetic construct
  source 1..22: mol_type = other RNA
cgcccccttaggtcgaccttgg

SEQ ID NO: 16794 - RNA, 22 nt, synthetic construct
  source 1..22: mol_type = other RNA
ttatcctatacgatgcatgggt

SEQ ID NO: 16795 - RNA, 22 nt, synthetic construct
  source 1..22: mol_type = other RNA
cttatcctatacgatgcatggg

SEQ ID NO: 16796 - RNA, 22 nt, synthetic construct
  source 1..22: mol_type = other RNA
aatgataagaacctcagtttct

SEQ ID NO: 16797 - RNA, 22 nt, synthetic construct
  source 1..22: mol_type = other RNA
ttatcctattaaatgataagaa

SEQ ID NO: 16798 - RNA, 22 nt, synthetic construct
  source 1..22: mol_type = other RNA
cttatcctattaaatgataaga

SEQ ID NO: 16799 - RNA, 22 nt, synthetic construct
  source 1..22: mol_type = other RNA
cttggcttctctgaacctcaat

SEQ ID NO: 16800 - RNA, 22 nt, synthetic construct
  source 1..22: mol_type = other RNA
ggcaggttacttggcttctctg

SEQ ID NO: 16801 - RNA, 22 nt, synthetic construct
  source 1..22: mol_type = other RNA
cctctcatagctgtgcatcttt

SEQ ID NO: 16802 - RNA, 22 nt, synthetic construct
  source 1..22: mol_type = other RNA
ccaagccagtgccagctttgcc

SEQ ID NO: 16803 - RNA, 22 nt, synthetic construct
  source 1..22: mol_type = other RNA
ttaccaagccagtgccagcttt

SEQ ID NO: 16804 - RNA, 22 nt, synthetic construct
  source 1..22: mol_type = other RNA
catcgttattaccaagccagtg

SEQ ID NO: 16805 - RNA, 22 nt, synthetic construct
  source 1..22: mol_type = other RNA
ccatcgttattaccaagccagt

SEQ ID NO: 16806 - RNA, 22 nt, synthetic construct
  source 1..22: mol_type = other RNA
agaccgtttccatcgttattac

SEQ ID NO: 16807 - RNA, 22 nt, synthetic construct
  source 1..22: mol_type = other RNA
gctctgcctgcacttacagcct

SEQ ID NO: 16808 - RNA, 22 nt, synthetic construct
  source 1..22: mol_type = other RNA
tgcttcaggctgctggccagca

SEQ ID NO: 16809 - RNA, 22 nt, synthetic construct
  source 1..22: mol_type = other RNA
tctaacaccctatccacacaaa

SEQ ID NO: 16810 - RNA, 22 nt, synthetic construct
  source 1..22: mol_type = other RNA
catgttctctaacaccctatcc

SEQ ID NO: 16811 - RNA, 22 nt, synthetic construct
  source 1..22: mol_type = other RNA
caagcatgaaccactctatcca

SEQ ID NO: 16812 - RNA, 22 nt, synthetic construct
  source 1..22: mol_type = other RNA
cccaggctggtctcaaactcct

SEQ ID NO: 16813 - RNA, 22 nt, synthetic construct
  source 1..22: mol_type = other RNA
tagagacagtctcactgtgttg

SEQ ID NO: 16814 - RNA, 22 nt, synthetic construct
  source 1..22: mol_type = other RNA
atagagacagtctcactgtgtt

SEQ ID NO: 16815 - RNA, 22 nt, synthetic construct
  source 1..22: mol_type = other RNA
tatagagacagtctcactgtgt

SEQ ID NO: 16816 - RNA, 22 nt, synthetic construct
  source 1..22: mol_type = other RNA
ttatagagacagtctcactgtg

SEQ ID NO: 16817 - RNA, 22 nt, synthetic construct
  source 1..22: mol_type = other RNA
tttatagagacagtctcactgt

SEQ ID NO: 16818 - RNA, 22 nt, synthetic construct
  source 1..22: mol_type = other RNA
aattttttatagagacagtctc

SEQ ID NO: 16819 - RNA, 22 nt, synthetic construct
  source 1..22: mol_type = other RNA
aaattttttatagagacagtct

SEQ ID NO: 16820 - RNA, 22 nt, synthetic construct
  source 1..22: mol_type = other RNA
taaattttttatagagacagtc

SEQ ID NO: 16821 - RNA, 22 nt, synthetic construct
  source 1..22: mol_type = other RNA
ttaaattttttatagagacagt

SEQ ID NO: 16822 - RNA, 22 nt, synthetic construct
  source 1..22: mol_type = other RNA
actgcagccttgaactgctggg

SEQ ID NO: 16823 - RNA, 22 nt, synthetic construct
  source 1..22: mol_type = other RNA
agacagggtctctgtcacccag

SEQ ID NO: 16824 - RNA, 22 nt, synthetic construct
  source 1..22: mol_type = other RNA
gagacagggtctctgtcaccca

SEQ ID NO: 16825 - RNA, 22 nt, synthetic construct
  source 1..22: mol_type = other RNA
tgagacagggtctctgtcaccc

SEQ ID NO: 16826 - RNA, 22 nt, synthetic construct
  source 1..22: mol_type = other RNA
ttgagacagggtctctgtcacc

SEQ ID NO: 16827 - RNA, 22 nt, synthetic construct
  source 1..22: mol_type = other RNA
tttgagacagggtctctgtcac

SEQ ID NO: 16828 - RNA, 22 nt, synthetic construct
  source 1..22: mol_type = other RNA
ttttgagacagggtctctgtca

SEQ ID NO: 16829 - RNA, 22 nt, synthetic construct
  source 1..22: mol_type = other RNA
catcttctcttttttttgagac

SEQ ID NO: 16830 - RNA, 22 nt, synthetic construct
  source 1..22: mol_type = other RNA
tggtcacaggactgggagagga

SEQ ID NO: 16831 - RNA, 22 nt, synthetic construct
  source 1..22: mol_type = other RNA
gtggtcacaggactgggagagg

SEQ ID NO: 16832 - RNA, 22 nt, synthetic construct
  source 1..22: mol_type = other RNA
agactggagatctgcacacaag

SEQ ID NO: 16833 - RNA, 22 nt, synthetic construct
  source 1..22: mol_type = other RNA
cacgtgtagcccattcagactg

SEQ ID NO: 16834 - RNA, 22 nt, synthetic construct
  source 1..22: mol_type = other RNA
gtaaattccacgtgtagcccat

SEQ ID NO: 16835 - RNA, 22 nt, synthetic construct
  source 1..22: mol_type = other RNA
ctaccagaaatggaaacttggc

SEQ ID NO: 16836 - RNA, 22 nt, synthetic construct
  source 1..22: mol_type = other RNA
caggtgtgagcgacttggaaaa

SEQ ID NO: 16837 - RNA, 22 nt, synthetic construct
  source 1..22: mol_type = other RNA
ggattacaggtgtgagcgactt

SEQ ID NO: 16838 - RNA, 22 nt, synthetic construct
  source 1..22: mol_type = other RNA
gccaggctggtctcaaactcct

SEQ ID NO: 16839 - RNA, 22 nt, synthetic construct
  source 1..22: mol_type = other RNA
gccatgttggccaggctggtct

SEQ ID NO: 16840 - RNA, 22 nt, synthetic construct
  source 1..22: mol_type = other RNA
cgccatgttggccaggctggtc

SEQ ID NO: 16841 - RNA, 22 nt, synthetic construct
  source 1..22: mol_type = other RNA
gccaggctagtcttgacctcat

SEQ ID NO: 16842 - RNA, 22 nt, synthetic construct
  source 1..22: mol_type = other RNA
gccatgttggccaggctagtct

SEQ ID NO: 16843 - RNA, 22 nt, synthetic construct
  source 1..22: mol_type = other RNA
cgccatgttggccaggctagtc

SEQ ID NO: 16844 - RNA, 22 nt, synthetic construct
  source 1..22: mol_type = other RNA
gtagagacgcggtttcgccatg

SEQ ID NO: 16845 - RNA, 22 nt, synthetic construct
  source 1..22: mol_type = other RNA
agtagagacgcggtttcgccat

SEQ ID NO: 16846 - RNA, 22 nt, synthetic construct
  source 1..22: mol_type = other RNA
tagtagagacgcggtttcgcca

SEQ ID NO: 16847 - RNA, 22 nt, synthetic construct
  source 1..22: mol_type = other RNA
ttagtagagacgcggtttcgcc

SEQ ID NO: 16848 - RNA, 22 nt, synthetic construct
  source 1..22: mol_type = other RNA
tttttagtagagacgcggtttc

SEQ ID NO: 16849 - RNA, 22 nt, synthetic construct
  source 1..22: mol_type = other RNA
gtttttagtagagacgcggttt

SEQ ID NO: 16850 - RNA, 22 nt, synthetic construct
  source 1..22: mol_type = other RNA
tttgtttttagtagagacgcgg

SEQ ID NO: 16851 - RNA, 22 nt, synthetic construct
  source 1..22: mol_type = other RNA
gtttgtttttagtagagacgcg

SEQ ID NO: 16852 - RNA, 22 nt, synthetic construct
  source 1..22: mol_type = other RNA
tttgtttgtttttagtagagac

SEQ ID NO: 16853 - RNA, 22 nt, synthetic construct
  source 1..22: mol_type = other RNA
gtttgtttgtttttagtagaga

SEQ ID NO: 16854 - RNA, 22 nt, synthetic construct
  source 1..22: mol_type = other RNA
tgtttgtttgtttttagtagag

SEQ ID NO: 16855 - RNA, 22 nt, synthetic construct
  source 1..22: mol_type = other RNA
ttgtttgtttgtttttagtaga

SEQ ID NO: 16856 - RNA, 22 nt, synthetic construct
  source 1..22: mol_type = other RNA
tatttttgtttgtttgttttta

SEQ ID NO: 16857 - RNA, 22 nt, synthetic construct
  source 1..22: mol_type = other RNA
gtatttttgtttgtttgttttt

SEQ ID NO: 16858 - RNA, 22 nt, synthetic construct
  source 1..22: mol_type = other RNA
tgtatttttgtttgtttgtttt

SEQ ID NO: 16859 - RNA, 22 nt, synthetic construct
  source 1..22: mol_type = other RNA
ttctgcctcagcctcccgagta

SEQ ID NO: 16860 - RNA, 22 nt, synthetic construct
  source 1..22: mol_type = other RNA
agacagagtctcactctgtcac

SEQ ID NO: 16861 - RNA, 22 nt, synthetic construct
  source 1..22: mol_type = other RNA
gagacagagtctcactctgtca

SEQ ID NO: 16862 - RNA, 22 nt, synthetic construct
  source 1..22: mol_type = other RNA
tgagacagagtctcactctgtc

SEQ ID NO: 16863 - RNA, 22 nt, synthetic construct
  source 1..22: mol_type = other RNA
ttgagacagagtctcactctgt

SEQ ID NO: 16864 - RNA, 22 nt, synthetic construct
  source 1..22: mol_type = other RNA
tttgagacagagtctcactctg

SEQ ID NO: 16865 - RNA, 22 nt, synthetic construct
  source 1..22: mol_type = other RNA
ttttgagacagagtctcactct

SEQ ID NO: 16866 - RNA, 22 nt, synthetic construct
  source 1..22: mol_type = other RNA
tgtttttttgagacagagtctc

SEQ ID NO: 16867 - RNA, 22 nt, synthetic construct
  source 1..22: mol_type = other RNA
gtgtttttttgagacagagtct

SEQ ID NO: 16868 - RNA, 22 nt, synthetic construct
  source 1..22: mol_type = other RNA
aaaagagaaacttttgtgtttt

SEQ ID NO: 16869 - RNA, 22 nt, synthetic construct
  source 1..22: mol_type = other RNA
gaaaagagaaacttttgtgttt

SEQ ID NO: 16870 - RNA, 22 nt, synthetic construct
  source 1..22: mol_type = other RNA
tgaaaagagaaacttttgtgtt

SEQ ID NO: 16871 - RNA, 22 nt, synthetic construct
  source 1..22: mol_type = other RNA
aagtaaaatgttttgaaaagag

SEQ ID NO: 16872 - RNA, 22 nt, synthetic construct
  source 1..22: mol_type = other RNA
aaagtaaaatgttttgaaaaga

SEQ ID NO: 16873 - RNA, 22 nt, synthetic construct
  source 1..22: mol_type = other RNA
gctccttttaaagtaaaatgtt

SEQ ID NO: 16874 - RNA, 22 nt, synthetic construct
  source 1..22: mol_type = other RNA
aattggctccttttaaagtaaa

SEQ ID NO: 16875 - RNA, 22 nt, synthetic construct
  source 1..22: mol_type = other RNA
tttaaattggctccttttaaag

SEQ ID NO: 16876 - RNA, 22 nt, synthetic construct
  source 1..22: mol_type = other RNA
ctttaaattggctccttttaaa

SEQ ID NO: 16877 - RNA, 22 nt, synthetic construct
  source 1..22: mol_type = other RNA
tctttaaattggctccttttaa

SEQ ID NO: 16878 - RNA, 22 nt, synthetic construct
  source 1..22: mol_type = other RNA
acagttttctttaaattggctc

SEQ ID NO: 16879 - RNA, 22 nt, synthetic construct
  source 1..22: mol_type = other RNA
cctgaactattaacagttttct

SEQ ID NO: 16880 - RNA, 22 nt, synthetic construct
  source 1..22: mol_type = other RNA
ctgtatctgcctgttacctgaa

SEQ ID NO: 16881 - RNA, 22 nt, synthetic construct
  source 1..22: mol_type = other RNA
cctgtatctgcctgttacctga

SEQ ID NO: 16882 - RNA, 22 nt, synthetic construct
  source 1..22: mol_type = other RNA
tctgctatggactgagtgggac

SEQ ID NO: 16883 - RNA, 22 nt, synthetic construct
  source 1..22: mol_type = other RNA
attctctgctatggactgagtg

SEQ ID NO: 16884 - RNA, 22 nt, synthetic construct
  source 1..22: mol_type = other RNA
aactgtgtcccagaacatcctc

SEQ ID NO: 16885 - RNA, 22 nt, synthetic construct
  source 1..22: mol_type = other RNA
atctctaatagccaaagtgtgt

SEQ ID NO: 16886 - RNA, 22 nt, synthetic construct
  source 1..22: mol_type = other RNA
caagacacaggagcgaaggggt

SEQ ID NO: 16887 - RNA, 22 nt, synthetic construct
  source 1..22: mol_type = other RNA
ccaaggctgccattgcaagaca

SEQ ID NO: 16888 - RNA, 22 nt, synthetic construct
  source 1..22: mol_type = other RNA
gccaaggctgccattgcaagac

SEQ ID NO: 16889 - RNA, 22 nt, synthetic construct
  source 1..22: mol_type = other RNA
gcgtttgccaaggctgccattg

SEQ ID NO: 16890 - RNA, 22 nt, synthetic construct
  source 1..22: mol_type = other RNA
agcgtttgccaaggctgccatt

SEQ ID NO: 16891 - RNA, 22 nt, synthetic construct
  source 1..22: mol_type = other RNA
atttagcgtttgccaaggctgc

SEQ ID NO: 16892 - RNA, 22 nt, synthetic construct
  source 1..22: mol_type = other RNA
catttagcgtttgccaaggctg

SEQ ID NO: 16893 - RNA, 22 nt, synthetic construct
  source 1..22: mol_type = other RNA
tcatttagcgtttgccaaggct

SEQ ID NO: 16894 - RNA, 22 nt, synthetic construct
  source 1..22: mol_type = other RNA
tcacgattttcatttagcgttt

SEQ ID NO: 16895 - RNA, 22 nt, synthetic construct
  source 1..22: mol_type = other RNA
gagtagtacaaggtgaacacaa

SEQ ID NO: 16896 - RNA, 22 nt, synthetic construct
  source 1..22: mol_type = other RNA
agacatgagttcgagtagtaca

SEQ ID NO: 16897 - RNA, 22 nt, synthetic construct
  source 1..22: mol_type = other RNA
agggataagtgagttaagacat

SEQ ID NO: 16898 - RNA, 22 nt, synthetic construct
  source 1..22: mol_type = other RNA
gagggataagtgagttaagaca

SEQ ID NO: 16899 - RNA, 22 nt, synthetic construct
  source 1..22: mol_type = other RNA
tgagggataagtgagttaagac

SEQ ID NO: 16900 - RNA, 22 nt, synthetic construct
  source 1..22: mol_type = other RNA
ttgagggataagtgagttaaga

SEQ ID NO: 16901 - RNA, 22 nt, synthetic construct
  source 1..22: mol_type = other RNA
tttttgagggataagtgagtta

SEQ ID NO: 16902 - RNA, 22 nt, synthetic construct
  source 1..22: mol_type = other RNA
tgagctgtgtggccttgcacgg

SEQ ID NO: 16903 - RNA, 22 nt, synthetic construct
  source 1..22: mol_type = other RNA
atgagctgtgtggccttgcacg

SEQ ID NO: 16904 - RNA, 22 nt, synthetic construct
  source 1..22: mol_type = other RNA
aaatcctggctctgccatttat

SEQ ID NO: 16905 - RNA, 22 nt, synthetic construct
  source 1..22: mol_type = other RNA
gggtcaggccacgggggttcaa

SEQ ID NO: 16906 - RNA, 22 nt, synthetic construct
  source 1..22: mol_type = other RNA
ggctttggggtcaggccacggg

SEQ ID NO: 16907 - RNA, 22 nt, synthetic construct
  source 1..22: mol_type = other RNA
cggctttggggtcaggccacgg

SEQ ID NO: 16908 - RNA, 22 nt, synthetic construct
  source 1..22: mol_type = other RNA
gatacccccatctcagagaaaa

SEQ ID NO: 16909 - RNA, 22 nt, synthetic construct
  source 1..22: mol_type = other RNA
ttccactgtggcccagggaagc

SEQ ID NO: 16910 - RNA, 22 nt, synthetic construct
  source 1..22: mol_type = other RNA
tatgtggccccagacagttctt

SEQ ID NO: 16911 - RNA, 22 nt, synthetic construct
  source 1..22: mol_type = other RNA
atatgtggccccagacagttct

SEQ ID NO: 16912 - RNA, 22 nt, synthetic construct
  source 1..22: mol_type = other RNA
tatatgtggccccagacagttc

SEQ ID NO: 16913 - RNA, 22 nt, synthetic construct
  source 1..22: mol_type = other RNA
gtatattttatatgtggcccca

SEQ ID NO: 16914 - RNA, 22 nt, synthetic construct
  source 1..22: mol_type = other RNA
gctcatgagctatcattagtat

SEQ ID NO: 16915 - RNA, 22 nt, synthetic construct
  source 1..22: mol_type = other RNA
agctcatgagctatcattagta

SEQ ID NO: 16916 - RNA, 22 nt, synthetic construct
  source 1..22: mol_type = other RNA
tagctcatgagctatcattagt

SEQ ID NO: 16917 - RNA, 22 nt, synthetic construct
  source 1..22: mol_type = other RNA
ttagctcatgagctatcattag

SEQ ID NO: 16918 - RNA, 22 nt, synthetic construct
  source 1..22: mol_type = other RNA
tttagctcatgagctatcatta

SEQ ID NO: 16919 - RNA, 22 nt, synthetic construct
  source 1..22: mol_type = other RNA
ttttttagctcatgagctatca

SEQ ID NO: 16920 - RNA, 22 nt, synthetic construct
  source 1..22: mol_type = other RNA
attttttagctcatgagctatc

SEQ ID NO: 16921 - RNA, 22 nt, synthetic construct
  source 1..22: mol_type = other RNA
tattttttagctcatgagctat

SEQ ID NO: 16922 - RNA, 22 nt, synthetic construct
  source 1..22: mol_type = other RNA
ttttattttttagctcatgagc

SEQ ID NO: 16923 - RNA, 22 nt, synthetic construct
  source 1..22: mol_type = other RNA
gttttattttttagctcatgag

SEQ ID NO: 16924 - RNA, 22 nt, synthetic construct
  source 1..22: mol_type = other RNA
tgttttattttttagctcatga

SEQ ID NO: 16925 - RNA, 22 nt, synthetic construct
  source 1..22: mol_type = other RNA
tgtgtgtgtgtgtgattttgtt

SEQ ID NO: 16926 - RNA, 22 nt, synthetic construct
  source 1..22: mol_type = other RNA
gtgtgtgtgtgtgtgattttgt

SEQ ID NO: 16927 - RNA, 22 nt, synthetic construct
  source 1..22: mol_type = other RNA
tgtgtgtgtgtgtgtgattttg

SEQ ID NO: 16928 - RNA, 22 nt, synthetic construct
  source 1..22: mol_type = other RNA
ttgtgtgtgtgtgtgtgatttt

SEQ ID NO: 16929 - RNA, 22 nt, synthetic construct
  source 1..22: mol_type = other RNA
tttgtgtgtgtgtgtgtgattt

SEQ ID NO: 16930 - RNA, 22 nt, synthetic construct
  source 1..22: mol_type = other RNA
ttttgtgtgtgtgtgtgtgatt

SEQ ID NO: 16931 - RNA, 22 nt, synthetic construct
  source 1..22: mol_type = other RNA
tgtttttttgtgtgtgtgtgtg

SEQ ID NO: 16932 - RNA, 22 nt, synthetic construct
  source 1..22: mol_type = other RNA
gtgtttttttgtgtgtgtgtgt

SEQ ID NO: 16933 - RNA, 22 nt, synthetic construct
  source 1..22: mol_type = other RNA
gtttgtgtttttttgtgtgtgt

SEQ ID NO: 16934 - RNA, 22 nt, synthetic construct
  source 1..22: mol_type = other RNA
ggtttgtgtttttttgtgtgtg

SEQ ID NO: 16935 - RNA, 22 nt, synthetic construct
  source 1..22: mol_type = other RNA
tggtttgtgtttttttgtgtgt

SEQ ID NO: 16936 - RNA, 22 nt, synthetic construct
  source 1..22: mol_type = other RNA
ttggtttgtgtttttttgtgtg

SEQ ID NO: 16937 - RNA, 22 nt, synthetic construct
  source 1..22: mol_type = other RNA
tttggtttgtgtttttttgtgt

SEQ ID NO: 16938 - RNA, 22 nt, synthetic construct
  source 1..22: mol_type = other RNA
ttttggtttgtgtttttttgtg

SEQ ID NO: 16939 - RNA, 22 nt, synthetic construct
  source 1..22: mol_type = other RNA
tttttggtttgtgtttttttgt

SEQ ID NO: 16940 - RNA, 22 nt, synthetic construct
  source 1..22: mol_type = other RNA
ttttttggtttgtgtttttttg

SEQ ID NO: 16941 - RNA, 22 nt, synthetic construct
  source 1..22: mol_type = other RNA
cttgaacctggaactgcagtga

SEQ ID NO: 16942 - RNA, 22 nt, synthetic construct
  source 1..22: mol_type = other RNA
gccaggcatggtgacatgcgcc

SEQ ID NO: 16943 - RNA, 22 nt, synthetic construct
  source 1..22: mol_type = other RNA
gcctggccaacatggtgaaacc

SEQ ID NO: 16944 - RNA, 22 nt, synthetic construct
  source 1..22: mol_type = other RNA
agcctggccaacatggtgaaac

SEQ ID NO: 16945 - RNA, 22 nt, synthetic construct
  source 1..22: mol_type = other RNA
tagcctggccaacatggtgaaa

SEQ ID NO: 16946 - RNA, 22 nt, synthetic construct
  source 1..22: mol_type = other RNA
tgagattttagcctggccaaca

SEQ ID NO: 16947 - RNA, 22 nt, synthetic construct
  source 1..22: mol_type = other RNA
ttaaaacgttatgagattttag

SEQ ID NO: 16948 - RNA, 22 nt, synthetic construct
  source 1..22: mol_type = other RNA
ataaactttcttaaaacgttat

SEQ ID NO: 16949 - RNA, 22 nt, synthetic construct
  source 1..22: mol_type = other RNA
actgtggcccaacacagattca

SEQ ID NO: 16950 - RNA, 22 nt, synthetic construct
  source 1..22: mol_type = other RNA
aatccgtggtgcggcctgtagg

SEQ ID NO: 16951 - RNA, 22 nt, synthetic construct
  source 1..22: mol_type = other RNA
agcctggggctcttgatgcctt

SEQ ID NO: 16952 - RNA, 22 nt, synthetic construct
  source 1..22: mol_type = other RNA
cagcctggggctcttgatgcct

SEQ ID NO: 16953 - RNA, 22 nt, synthetic construct
  source 1..22: mol_type = other RNA
tataagctccagctctggggtg

SEQ ID NO: 16954 - RNA, 22 nt, synthetic construct
  source 1..22: mol_type = other RNA
gagaacctgctgccctgggttc

SEQ ID NO: 16955 - RNA, 22 nt, synthetic construct
  source 1..22: mol_type = other RNA
agaaagggggaaaaaaatctag

SEQ ID NO: 16956 - RNA, 22 nt, synthetic construct
  source 1..22: mol_type = other RNA
cagaaagggggaaaaaaatcta

SEQ ID NO: 16957 - RNA, 22 nt, synthetic construct
  source 1..22: mol_type = other RNA
cagtttcagaaagggggaaaaa

SEQ ID NO: 16958 - RNA, 22 nt, synthetic construct
  source 1..22: mol_type = other RNA
tgactacagaaaccagccagcc

SEQ ID NO: 16959 - RNA, 22 nt, synthetic construct
  source 1..22: mol_type = other RNA
cttcacgaaggggatctagcac

SEQ ID NO: 16960 - RNA, 22 nt, synthetic construct
  source 1..22: mol_type = other RNA
ctgagctaagacattgcttcac

SEQ ID NO: 16961 - RNA, 22 nt, synthetic construct
  source 1..22: mol_type = other RNA
agagcctcacccaccagtgcgc

SEQ ID NO: 16962 - RNA, 22 nt, synthetic construct
  source 1..22: mol_type = other RNA
ccttctaccactttcagagcct

SEQ ID NO: 16963 - RNA, 22 nt, synthetic construct
  source 1..22: mol_type = other RNA
ccctgaggagcaggacagcggg

SEQ ID NO: 16964 - RNA, 22 nt, synthetic construct
  source 1..22: mol_type = other RNA
gccctgaggagcaggacagcgg

SEQ ID NO: 16965 - RNA, 22 nt, synthetic construct
  source 1..22: mol_type = other RNA
cagatgaggaaactggcccaga

SEQ ID NO: 16966 - RNA, 22 nt, synthetic construct
  source 1..22: mol_type = other RNA
ccagatgaggaaactggcccag

SEQ ID NO: 16967 - RNA, 22 nt, synthetic construct
  source 1..22: mol_type = other RNA
tcaggcactccatggacacaaa

SEQ ID NO: 16968 - RNA, 22 nt, synthetic construct
  source 1..22: mol_type = other RNA
tacctgggaacaggtggggcta

SEQ ID NO: 16969 - RNA, 22 nt, synthetic construct
  source 1..22: mol_type = other RNA
ctacctgggaacaggtggggct

SEQ ID NO: 16970 - RNA, 22 nt, synthetic construct
  source 1..22: mol_type = other RNA
gtttctacctgggaacaggtgg

SEQ ID NO: 16971 - RNA, 22 nt, synthetic construct
  source 1..22: mol_type = other RNA
cctgccggtattggtttctacc

SEQ ID NO: 16972 - RNA, 22 nt, synthetic construct
  source 1..22: mol_type = other RNA
agaaggcccctagccttgagaa

SEQ ID NO: 16973 - RNA, 22 nt, synthetic construct
  source 1..22: mol_type = other RNA
aaggaggaaaagtgctgctgct

SEQ ID NO: 16974 - RNA, 22 nt, synthetic construct
  source 1..22: mol_type = other RNA
tagaaggcaaggtctttgaagg

SEQ ID NO: 16975 - RNA, 22 nt, synthetic construct
  source 1..22: mol_type = other RNA
ctagaaggcaaggtctttgaag

SEQ ID NO: 16976 - RNA, 22 nt, synthetic construct
  source 1..22: mol_type = other RNA
gtacatggagaaaggaatgagc

SEQ ID NO: 16977 - RNA, 22 nt, synthetic construct
  source 1..22: mol_type = other RNA
ggtacatggagaaaggaatgag

SEQ ID NO: 16978 - RNA, 22 nt, synthetic construct
  source 1..22: mol_type = other RNA
tggtacatggagaaaggaatga

SEQ ID NO: 16979 - RNA, 22 nt, synthetic construct
  source 1..22: mol_type = other RNA
ttggtacatggagaaaggaatg

SEQ ID NO: 16980 - RNA, 22 nt, synthetic construct
  source 1..22: mol_type = other RNA
tttggtacatggagaaaggaat

SEQ ID NO: 16981 - RNA, 22 nt, synthetic construct
  source 1..22: mol_type = other RNA
attttttggtacatggagaaag

SEQ ID NO: 16982 - RNA, 22 nt, synthetic construct
  source 1..22: mol_type = other RNA
attgattttttggtacatggag

SEQ ID NO: 16983 - RNA, 22 nt, synthetic construct
  source 1..22: mol_type = other RNA
gccactttaattgattttttgg

SEQ ID NO: 16984 - RNA, 22 nt, synthetic construct
  source 1..22: mol_type = other RNA
tgagataaggtagagaccctcc

SEQ ID NO: 16985 - RNA, 22 nt, synthetic construct
  source 1..22: mol_type = other RNA
ccgtctgtctccttccggccac

SEQ ID NO: 16986 - RNA, 22 nt, synthetic construct
  source 1..22: mol_type = other RNA
ctcagggacatggacctgtgca

SEQ ID NO: 16987 - RNA, 22 nt, synthetic construct
  source 1..22: mol_type = other RNA
gctttcctcagggacatggacc

SEQ ID NO: 16988 - RNA, 22 nt, synthetic construct
  source 1..22: mol_type = other RNA
tctgtgacgttggctttcctca

SEQ ID NO: 16989 - RNA, 22 nt, synthetic construct
  source 1..22: mol_type = other RNA
ctctgtgacgttggctttcctc

SEQ ID NO: 16990 - RNA, 22 nt, synthetic construct
  source 1..22: mol_type = other RNA
agaaagtggtcatcatttctct

SEQ ID NO: 16991 - RNA, 22 nt, synthetic construct
  source 1..22: mol_type = other RNA
gagaaagtggtcatcatttctc

SEQ ID NO: 16992 - RNA, 22 nt, synthetic construct
  source 1..22: mol_type = other RNA
gcagccaacgtgcaaatccgaa

SEQ ID NO: 16993 - RNA, 22 nt, synthetic construct
  source 1..22: mol_type = other RNA
ttggatgtggcaggacctggag

SEQ ID NO: 16994 - RNA, 22 nt, synthetic construct
  source 1..22: mol_type = other RNA
aaatactaagtaaataatagtc

SEQ ID NO: 16995 - RNA, 22 nt, synthetic construct
  source 1..22: mol_type = other RNA
aaaatactaagtaaataatagt

SEQ ID NO: 16996 - RNA, 22 nt, synthetic construct
  source 1..22: mol_type = other RNA
gtttaaaatactaagtaaataa

SEQ ID NO: 16997 - RNA, 22 nt, synthetic construct
  source 1..22: mol_type = other RNA
aaaagtacattggtttaaaata

SEQ ID NO: 16998 - RNA, 22 nt, synthetic construct
  source 1..22: mol_type = other RNA
aaaaagtacattggtttaaaat

SEQ ID NO: 16999 - RNA, 22 nt, synthetic construct
  source 1..22: mol_type = other RNA
gagtttaaaaagtacattggtt

SEQ ID NO: 17000 - RNA, 22 nt, synthetic construct
  source 1..22: mol_type = other RNA
aaaaattggagtttaaaaagta

SEQ ID NO: 17001 - RNA, 22 nt, synthetic construct
  source 1..22: mol_type = other RNA
tatggtgacataaatgatctta

SEQ ID NO: 17002 - RNA, 22 nt, synthetic construct
  source 1..22: mol_type = other RNA
ggtgttatatggtgacataaat

SEQ ID NO: 17003 - RNA, 22 nt, synthetic construct
  source 1..22: mol_type = other RNA
tactgctttgggtgttatatgg

SEQ ID NO: 17004 - RNA, 22 nt, synthetic construct
  source 1..22: mol_type = other RNA
ccttctgtgtatgacaaattct

SEQ ID NO: 17005 - RNA, 22 nt, synthetic construct
  source 1..22: mol_type = other RNA
gcattgccttctgtgtatgaca

SEQ ID NO: 17006 - RNA, 22 nt, synthetic construct
  source 1..22: mol_type = other RNA
agcattgccttctgtgtatgac

SEQ ID NO: 17007 - RNA, 22 nt, synthetic construct
  source 1..22: mol_type = other RNA
tagcattgccttctgtgtatga

SEQ ID NO: 17008 - RNA, 22 nt, synthetic construct
  source 1..22: mol_type = other RNA
ttagcattgccttctgtgtatg

SEQ ID NO: 17009 - RNA, 22 nt, synthetic construct
  source 1..22: mol_type = other RNA
tatttttagcattgccttctgt

SEQ ID NO: 17010 - RNA, 22 nt, synthetic construct
  source 1..22: mol_type = other RNA
attgtatttttagcattgcctt

SEQ ID NO: 17011 - RNA, 22 nt, synthetic construct
  source 1..22: mol_type = other RNA
cattgtatttttagcattgcct

SEQ ID NO: 17012 - RNA, 22 nt, synthetic construct
  source 1..22: mol_type = other RNA
tcattgtatttttagcattgcc

SEQ ID NO: 17013 - RNA, 22 nt, synthetic construct
  source 1..22: mol_type = other RNA
cattttcattgtatttttagca

SEQ ID NO: 17014 - RNA, 22 nt, synthetic construct
  source 1..22: mol_type = other RNA
tacaggccaagggtatcaagct

SEQ ID NO: 17015 - RNA, 22 nt, synthetic construct
  source 1..22: mol_type = other RNA
actggcacaaggctcagttata

SEQ ID NO: 17016 - RNA, 22 nt, synthetic construct
  source 1..22: mol_type = other RNA
aactggcacaaggctcagttat

SEQ ID NO: 17017 - RNA, 22 nt, synthetic construct
  source 1..22: mol_type = other RNA
cccttttaactggcacaaggct

SEQ ID NO: 17018 - RNA, 22 nt, synthetic construct
  source 1..22: mol_type = other RNA
ccccagtgaggtggtctgctgg

SEQ ID NO: 17019 - RNA, 22 nt, synthetic construct
  source 1..22: mol_type = other RNA
cccccagtgaggtggtctgctg

SEQ ID NO: 17020 - RNA, 22 nt, synthetic construct
  source 1..22: mol_type = other RNA
ggctcctggccacgctgtcctg

SEQ ID NO: 17021 - RNA, 22 nt, synthetic construct
  source 1..22: mol_type = other RNA
gatgactcatctcagataccca

SEQ ID NO: 17022 - RNA, 22 nt, synthetic construct
  source 1..22: mol_type = other RNA
gaccagggaggaaactgaggct

SEQ ID NO: 17023 - RNA, 22 nt, synthetic construct
  source 1..22: mol_type = other RNA
cattagaccagggaggaaactg

SEQ ID NO: 17024 - RNA, 22 nt, synthetic construct
  source 1..22: mol_type = other RNA
aaaataactgcctctcccacat

SEQ ID NO: 17025 - RNA, 22 nt, synthetic construct
  source 1..22: mol_type = other RNA
tgggagtccctcctggcaaggg

SEQ ID NO: 17026 - RNA, 22 nt, synthetic construct
  source 1..22: mol_type = other RNA
ctgggagtccctcctggcaagg

SEQ ID NO: 17027 - RNA, 22 nt, synthetic construct
  source 1..22: mol_type = other RNA
gtacccagcgagtccccagatg

SEQ ID NO: 17028 - RNA, 22 nt, synthetic construct
  source 1..22: mol_type = other RNA
aagtagcccaagggcggtgata

SEQ ID NO: 17029 - RNA, 22 nt, synthetic construct
  source 1..22: mol_type = other RNA
ccaaggagggtgtgtctgtgtg

SEQ ID NO: 17030 - RNA, 22 nt, synthetic construct
  source 1..22: mol_type = other RNA
cttgggtgcccttcctcctgag

SEQ ID NO: 17031 - RNA, 22 nt, synthetic construct
  source 1..22: mol_type = other RNA
gtgcttgcttaatgaatgacgt

SEQ ID NO: 17032 - RNA, 22 nt, synthetic construct
  source 1..22: mol_type = other RNA
ggatagtgaatgatgtatagtt

SEQ ID NO: 17033 - RNA, 22 nt, synthetic construct
  source 1..22: mol_type = other RNA
gattgggatagtgaatgatgta

SEQ ID NO: 17034 - RNA, 22 nt, synthetic construct
  source 1..22: mol_type = other RNA
cttctctgtaaaacagggataa

SEQ ID NO: 17035 - RNA, 22 nt, synthetic construct
  source 1..22: mol_type = other RNA
ccttctctgtaaaacagggata

SEQ ID NO: 17036 - RNA, 22 nt, synthetic construct
  source 1..22: mol_type = other RNA
aatcccagctccaccaacacct

SEQ ID NO: 17037 - RNA, 22 nt, synthetic construct
  source 1..22: mol_type = other RNA
aaatcccagctccaccaacacc

SEQ ID NO: 17038 - RNA, 22 nt, synthetic construct
  source 1..22: mol_type = other RNA
gtttaaatcccagctccaccaa

SEQ ID NO: 17039 - RNA, 22 nt, synthetic construct
  source 1..22: mol_type = other RNA
ggtttaaatcccagctccacca

SEQ ID NO: 17040 - RNA, 22 nt, synthetic construct
  source 1..22: mol_type = other RNA
tggtttaaatcccagctccacc

SEQ ID NO: 17041 - RNA, 22 nt, synthetic construct
  source 1..22: mol_type = other RNA
gacatattttggtttaaatccc

SEQ ID NO: 17042 - RNA, 22 nt, synthetic construct
  source 1..22: mol_type = other RNA
cagttggacatattttggttta

SEQ ID NO: 17043 - RNA, 22 nt, synthetic construct
  source 1..22: mol_type = other RNA
cttacatgctttgcagttggac

SEQ ID NO: 17044 - RNA, 22 nt, synthetic construct
  source 1..22: mol_type = other RNA
ttacttacatgctttgcagttg

SEQ ID NO: 17045 - RNA, 22 nt, synthetic construct
  source 1..22: mol_type = other RNA
cttagggtcacctccgtatacc

SEQ ID NO: 17046 - RNA, 22 nt, synthetic construct
  source 1..22: mol_type = other RNA
cttgttacttagggtcacctcc

SEQ ID NO: 17047 - RNA, 22 nt, synthetic construct
  source 1..22: mol_type = other RNA
cttgctcactatatgtgattcc

SEQ ID NO: 17048 - RNA, 22 nt, synthetic construct
  source 1..22: mol_type = other RNA
accaaaaactgaaaagcaaatt

SEQ ID NO: 17049 - RNA, 22 nt, synthetic construct
  source 1..22: mol_type = other RNA
tcctctaaataatcataaggat

SEQ ID NO: 17050 - RNA, 22 nt, synthetic construct
  source 1..22: mol_type = other RNA
acaactgtcgggtgataaacat

SEQ ID NO: 17051 - RNA, 22 nt, synthetic construct
  source 1..22: mol_type = other RNA
aaaagagattaacaactgtcgg

SEQ ID NO: 17052 - RNA, 22 nt, synthetic construct
  source 1..22: mol_type = other RNA
ttaaaaagagattaacaactgt

SEQ ID NO: 17053 - RNA, 22 nt, synthetic construct
  source 1..22: mol_type = other RNA
tttgttaaaaagagattaacaa

SEQ ID NO: 17054 - RNA, 22 nt, synthetic construct
  source 1..22: mol_type = other RNA
gccaaataccaaagccagctaa

SEQ ID NO: 17055 - RNA, 22 nt, synthetic construct
  source 1..22: mol_type = other RNA
ggccaaataccaaagccagcta

SEQ ID NO: 17056 - RNA, 22 nt, synthetic construct
  source 1..22: mol_type = other RNA
acttttggccaaataccaaagc

SEQ ID NO: 17057 - RNA, 22 nt, synthetic construct
  source 1..22: mol_type = other RNA
aaaaatgtctgtcactaaagag

SEQ ID NO: 17058 - RNA, 22 nt, synthetic construct
  source 1..22: mol_type = other RNA
aaaaaatgtctgtcactaaaga

SEQ ID NO: 17059 - RNA, 22 nt, synthetic construct
  source 1..22: mol_type = other RNA
taaaaaatgtctgtcactaaag

SEQ ID NO: 17060 - RNA, 22 nt, synthetic construct
  source 1..22: mol_type = other RNA
ttaaaaaatgtctgtcactaaa

SEQ ID NO: 17061 - RNA, 22 nt, synthetic construct
  source 1..22: mol_type = other RNA
tttaaaaaatgtctgtcactaa

SEQ ID NO: 17062 - RNA, 22 nt, synthetic construct
  source 1..22: mol_type = other RNA
ttttttaaaaaatgtctgtcac

SEQ ID NO: 17063 - RNA, 22 nt, synthetic construct
  source 1..22: mol_type = other RNA
attttttaaaaaatgtctgtca

SEQ ID NO: 17064 - RNA, 22 nt, synthetic construct
  source 1..22: mol_type = other RNA
tgtgaatttattttttaaaaaa

SEQ ID NO: 17065 - RNA, 22 nt, synthetic construct
  source 1..22: mol_type = other RNA
atgtgaatttattttttaaaaa

SEQ ID NO: 17066 - RNA, 22 nt, synthetic construct
  source 1..22: mol_type = other RNA
tatgtgaatttattttttaaaa

SEQ ID NO: 17067 - RNA, 22 nt, synthetic construct
  source 1..22: mol_type = other RNA
ttatgtgaatttattttttaaa

SEQ ID NO: 17068 - RNA, 22 nt, synthetic construct
  source 1..22: mol_type = other RNA
gtgcttcatctgtaaaactact

SEQ ID NO: 17069 - RNA, 22 nt, synthetic construct
  source 1..22: mol_type = other RNA
agtgcttcatctgtaaaactac

SEQ ID NO: 17070 - RNA, 22 nt, synthetic construct
  source 1..22: mol_type = other RNA
tagtgcttcatctgtaaaacta

SEQ ID NO: 17071 - RNA, 22 nt, synthetic construct
  source 1..22: mol_type = other RNA
agatgaaatgcactagttttag

SEQ ID NO: 17072 - RNA, 22 nt, synthetic construct
  source 1..22: mol_type = other RNA
aagatgaaatgcactagtttta

SEQ ID NO: 17073 - RNA, 22 nt, synthetic construct
  source 1..22: mol_type = other RNA
cagtttaagatgaaatgcacta

SEQ ID NO: 17074 - RNA, 22 nt, synthetic construct
  source 1..22: mol_type = other RNA
gcagtttaagatgaaatgcact

SEQ ID NO: 17075 - RNA, 22 nt, synthetic construct
  source 1..22: mol_type = other RNA
taatttgcagtttaagatgaaa

SEQ ID NO: 17076 - RNA, 22 nt, synthetic construct
  source 1..22: mol_type = other RNA
cctttataatttgcagtttaag

SEQ ID NO: 17077 - RNA, 22 nt, synthetic construct
  source 1..22: mol_type = other RNA
ttccctttataatttgcagttt

SEQ ID NO: 17078 - RNA, 22 nt, synthetic construct
  source 1..22: mol_type = other RNA
ctattattccctttataatttg

SEQ ID NO: 17079 - RNA, 22 nt, synthetic construct
  source 1..22: mol_type = other RNA
gtgaaggtggtgtctgccaggt

SEQ ID NO: 17080 - RNA, 22 nt, synthetic construct
  source 1..22: mol_type = other RNA
atcagttggtgaaggtggtgtc

SEQ ID NO: 17081 - RNA, 22 nt, synthetic construct
  source 1..22: mol_type = other RNA
actttgatcagttggtgaaggt

SEQ ID NO: 17082 - RNA, 22 nt, synthetic construct
  source 1..22: mol_type = other RNA
tggcgatgttaactttgatcag

SEQ ID NO: 17083 - RNA, 22 nt, synthetic construct
  source 1..22: mol_type = other RNA
cagaagtgagtgtgtgtcttca

SEQ ID NO: 17084 - RNA, 22 nt, synthetic construct
  source 1..22: mol_type = other RNA
ttggcaggaatattgcagaagt

SEQ ID NO: 17085 - RNA, 22 nt, synthetic construct
  source 1..22: mol_type = other RNA
agatgaggcattcttggcagga

SEQ ID NO: 17086 - RNA, 22 nt, synthetic construct
  source 1..22: mol_type = other RNA
gattcagatgaggcattcttgg

SEQ ID NO: 17087 - RNA, 22 nt, synthetic construct
  source 1..22: mol_type = other RNA
tactcgagattagattcagatg

SEQ ID NO: 17088 - RNA, 22 nt, synthetic construct
  source 1..22: mol_type = other RNA
tctgatggttatactcgagatt

SEQ ID NO: 17089 - RNA, 22 nt, synthetic construct
  source 1..22: mol_type = other RNA
gtctgatggttatactcgagat

SEQ ID NO: 17090 - RNA, 22 nt, synthetic construct
  source 1..22: mol_type = other RNA
ggtttgtctgatggttatactc

SEQ ID NO: 17091 - RNA, 22 nt, synthetic construct
  source 1..22: mol_type = other RNA
gggtttgtctgatggttatact

SEQ ID NO: 17092 - RNA, 22 nt, synthetic construct
  source 1..22: mol_type = other RNA
taaactgtctctcaatttgggt

SEQ ID NO: 17093 - RNA, 22 nt, synthetic construct
  source 1..22: mol_type = other RNA
gtaaactgtctctcaatttggg

SEQ ID NO: 17094 - RNA, 22 nt, synthetic construct
  source 1..22: mol_type = other RNA
tgtaaactgtctctcaatttgg

SEQ ID NO: 17095 - RNA, 22 nt, synthetic construct
  source 1..22: mol_type = other RNA
agcagagtacaaggctggtgtt

SEQ ID NO: 17096 - RNA, 22 nt, synthetic construct
  source 1..22: mol_type = other RNA
acatattaagcagagtacaagg

SEQ ID NO: 17097 - RNA, 22 nt, synthetic construct
  source 1..22: mol_type = other RNA
tctcttgtgacattgacatatt

SEQ ID NO: 17098 - RNA, 22 nt, synthetic construct
  source 1..22: mol_type = other RNA
atctcgagccttcttcagtctg

SEQ ID NO: 17099 - RNA, 22 nt, synthetic construct
  source 1..22: mol_type = other RNA
cattaatctcgagccttcttca

SEQ ID NO: 17100 - RNA, 22 nt, synthetic construct
  source 1..22: mol_type = other RNA
gcattaatctcgagccttcttc

SEQ ID NO: 17101 - RNA, 22 nt, synthetic construct
  source 1..22: mol_type = other RNA
aggtccaagatgcaatcccaga

SEQ ID NO: 17102 - RNA, 22 nt, synthetic construct
  source 1..22: mol_type = other RNA
tcccagtagtgtcccttaacaa

SEQ ID NO: 17103 - RNA, 22 nt, synthetic construct
  source 1..22: mol_type = other RNA
caccactgcactccagcctggg

SEQ ID NO: 17104 - RNA, 22 nt, synthetic construct
  source 1..22: mol_type = other RNA
ttccaccactgcactccagcct

SEQ ID NO: 17105 - RNA, 22 nt, synthetic construct
  source 1..22: mol_type = other RNA
ttattccaccactgcactccag

SEQ ID NO: 17106 - RNA, 22 nt, synthetic construct
  source 1..22: mol_type = other RNA
aaggctgcagtgagttattatt

SEQ ID NO: 17107 - RNA, 22 nt, synthetic construct
  source 1..22: mol_type = other RNA
cttgagtccgggagttcaaggc

SEQ ID NO: 17108 - RNA, 22 nt, synthetic construct
  source 1..22: mol_type = other RNA
ctcggaaggctcaggcaggagg

SEQ ID NO: 17109 - RNA, 22 nt, synthetic construct
  source 1..22: mol_type = other RNA
tggtacacgcccatagtcccag

SEQ ID NO: 17110 - RNA, 22 nt, synthetic construct
  source 1..22: mol_type = other RNA
aaaccagcctgggcaacatagt

SEQ ID NO: 17111 - RNA, 22 nt, synthetic construct
  source 1..22: mol_type = other RNA
gaaaccagcctgggcaacatag

SEQ ID NO: 17112 - RNA, 22 nt, synthetic construct
  source 1..22: mol_type = other RNA
tagaggctgaggtggaaggatc

SEQ ID NO: 17113 - RNA, 22 nt, synthetic construct
  source 1..22: mol_type = other RNA
atagaggctgaggtggaaggat

SEQ ID NO: 17114 - RNA, 22 nt, synthetic construct
  source 1..22: mol_type = other RNA
tatagaggctgaggtggaagga

SEQ ID NO: 17115 - RNA, 22 nt, synthetic construct
  source 1..22: mol_type = other RNA
aaattttatagaggctgaggtg

SEQ ID NO: 17116 - RNA, 22 nt, synthetic construct
  source 1..22: mol_type = other RNA
ttcaaattttatagaggctgag

SEQ ID NO: 17117 - RNA, 22 nt, synthetic construct
  source 1..22: mol_type = other RNA
atacactatacaatcctatgac

SEQ ID NO: 17118 - RNA, 22 nt, synthetic construct
  source 1..22: mol_type = other RNA
tcaaaatcagcaaatctaatat

SEQ ID NO: 17119 - RNA, 22 nt, synthetic construct
  source 1..22: mol_type = other RNA
cataaccacagtagggttgtca

SEQ ID NO: 17120 - RNA, 22 nt, synthetic construct
  source 1..22: mol_type = other RNA
gcataaccacagtagggttgtc

SEQ ID NO: 17121 - RNA, 22 nt, synthetic construct
  source 1..22: mol_type = other RNA
cttagaacaaggacaaatttgc

SEQ ID NO: 17122 - RNA, 22 nt, synthetic construct
  source 1..22: mol_type = other RNA
ccttagaacaaggacaaatttg

SEQ ID NO: 17123 - RNA, 22 nt, synthetic construct
  source 1..22: mol_type = other RNA
tttccttagaacaaggacaaat

SEQ ID NO: 17124 - RNA, 22 nt, synthetic construct
  source 1..22: mol_type = other RNA
atttccttagaacaaggacaaa

SEQ ID NO: 17125 - RNA, 22 nt, synthetic construct
  source 1..22: mol_type = other RNA
agtatttatttccttagaacaa

SEQ ID NO: 17126 - RNA, 22 nt, synthetic construct
  source 1..22: mol_type = other RNA
ctcctaaataattcagtattta

SEQ ID NO: 17127 - RNA, 22 nt, synthetic construct
  source 1..22: mol_type = other RNA
tgcacctttactcctaaataat

SEQ ID NO: 17128 - RNA, 22 nt, synthetic construct
  source 1..22: mol_type = other RNA
attatgcacctttactcctaaa

SEQ ID NO: 17129 - RNA, 22 nt, synthetic construct
  source 1..22: mol_type = other RNA
aaaatgggttcattatgcacct

SEQ ID NO: 17130 - RNA, 22 nt, synthetic construct
  source 1..22: mol_type = other RNA
gaaaatgggttcattatgcacc

SEQ ID NO: 17131 - RNA, 22 nt, synthetic construct
  source 1..22: mol_type = other RNA
ataagcatttgaaaatgggttc

SEQ ID NO: 17132 - RNA, 22 nt, synthetic construct
  source 1..22: mol_type = other RNA
cataagcatttgaaaatgggtt

SEQ ID NO: 17133 - RNA, 22 nt, synthetic construct
  source 1..22: mol_type = other RNA
tcataagcatttgaaaatgggt

SEQ ID NO: 17134 - RNA, 22 nt, synthetic construct
  source 1..22: mol_type = other RNA
tatatgcatgcctgtgtatatg

SEQ ID NO: 17135 - RNA, 22 nt, synthetic construct
  source 1..22: mol_type = other RNA
gtatatgcatgcctgtgtatat

SEQ ID NO: 17136 - RNA, 22 nt, synthetic construct
  source 1..22: mol_type = other RNA
ctcatgtacacgtgcatgctct

SEQ ID NO: 17137 - RNA, 22 nt, synthetic construct
  source 1..22: mol_type = other RNA
gcactttgctcatgtacacgtg

SEQ ID NO: 17138 - RNA, 22 nt, synthetic construct
  source 1..22: mol_type = other RNA
caccagttagcactttgctcat

SEQ ID NO: 17139 - RNA, 22 nt, synthetic construct
  source 1..22: mol_type = other RNA
caagagcacaaacaatgcccgc

SEQ ID NO: 17140 - RNA, 22 nt, synthetic construct
  source 1..22: mol_type = other RNA
acacttacagaaaagttgcaag

SEQ ID NO: 17141 - RNA, 22 nt, synthetic construct
  source 1..22: mol_type = other RNA
cacacttacagaaaagttgcaa

SEQ ID NO: 17142 - RNA, 22 nt, synthetic construct
  source 1..22: mol_type = other RNA
tgaagtaatttcacacttacag

SEQ ID NO: 17143 - RNA, 22 nt, synthetic construct
  source 1..22: mol_type = other RNA
ctgaattaaaaacaaacaaaca

SEQ ID NO: 17144 - RNA, 22 nt, synthetic construct
  source 1..22: mol_type = other RNA
cctgaattaaaaacaaacaaac

SEQ ID NO: 17145 - RNA, 22 nt, synthetic construct
  source 1..22: mol_type = other RNA
tcctgaattaaaaacaaacaaa

SEQ ID NO: 17146 - RNA, 22 nt, synthetic construct
  source 1..22: mol_type = other RNA
atacgcactcttccaacttttt

SEQ ID NO: 17147 - RNA, 22 nt, synthetic construct
  source 1..22: mol_type = other RNA
catacgcactcttccaactttt

SEQ ID NO: 17148 - RNA, 22 nt, synthetic construct
  source 1..22: mol_type = other RNA
tgccaggcctatttcatacgca

SEQ ID NO: 17149 - RNA, 22 nt, synthetic construct
  source 1..22: mol_type = other RNA
ctgccaggcctatttcatacgc

SEQ ID NO: 17150 - RNA, 22 nt, synthetic construct
  source 1..22: mol_type = other RNA
aggggtgcctccagtgagggct

SEQ ID NO: 17151 - RNA, 22 nt, synthetic construct
  source 1..22: mol_type = other RNA
gaggggtgcctccagtgagggc

SEQ ID NO: 17152 - RNA, 22 nt, synthetic construct
  source 1..22: mol_type = other RNA
cctggccacagcactgagggtt

SEQ ID NO: 17153 - RNA, 22 nt, synthetic construct
  source 1..22: mol_type = other RNA
tccctgtctcacaaataaatgg

SEQ ID NO: 17154 - RNA, 22 nt, synthetic construct
  source 1..22: mol_type = other RNA
ggaaacctaagatcacaataaa

SEQ ID NO: 17155 - RNA, 22 nt, synthetic construct
  source 1..22: mol_type = other RNA
gggaaacctaagatcacaataa

SEQ ID NO: 17156 - RNA, 22 nt, synthetic construct
  source 1..22: mol_type = other RNA
ctcccagaacttctgaaagcat

SEQ ID NO: 17157 - RNA, 22 nt, synthetic construct
  source 1..22: mol_type = other RNA
tctgctagctttcctcccagaa

SEQ ID NO: 17158 - RNA, 22 nt, synthetic construct
  source 1..22: mol_type = other RNA
atctgctagctttcctcccaga

SEQ ID NO: 17159 - RNA, 22 nt, synthetic construct
  source 1..22: mol_type = other RNA
tggtttatctgctagctttcct

SEQ ID NO: 17160 - RNA, 22 nt, synthetic construct
  source 1..22: mol_type = other RNA
ctggtttatctgctagctttcc

SEQ ID NO: 17161 - RNA, 22 nt, synthetic construct
  source 1..22: mol_type = other RNA
atatttctggtttatctgctag

SEQ ID NO: 17162 - RNA, 22 nt, synthetic construct
  source 1..22: mol_type = other RNA
gatattcatatttctggtttat

SEQ ID NO: 17163 - RNA, 22 nt, synthetic construct
  source 1..22: mol_type = other RNA
ggatattcatatttctggttta

SEQ ID NO: 17164 - RNA, 22 nt, synthetic construct
  source 1..22: mol_type = other RNA
ccgaactaagaaagtgagggct

SEQ ID NO: 17165 - RNA, 22 nt, synthetic construct
  source 1..22: mol_type = other RNA
gccgaactaagaaagtgagggc

SEQ ID NO: 17166 - RNA, 22 nt, synthetic construct
  source 1..22: mol_type = other RNA
tgccgaactaagaaagtgaggg

SEQ ID NO: 17167 - RNA, 22 nt, synthetic construct
  source 1..22: mol_type = other RNA
agccaagaaacaggcagggtct

SEQ ID NO: 17168 - RNA, 22 nt, synthetic construct
  source 1..22: mol_type = other RNA
cagccaagaaacaggcagggtc

SEQ ID NO: 17169 - RNA, 22 nt, synthetic construct
  source 1..22: mol_type = other RNA
tacaaactggagatttcagcca

SEQ ID NO: 17170 - RNA, 22 nt, synthetic construct
  source 1..22: mol_type = other RNA
gtgccagctgcgtcttcagaca

SEQ ID NO: 17171 - RNA, 22 nt, synthetic construct
  source 1..22: mol_type = other RNA
tgggagatcccacagccagggg

SEQ ID NO: 17172 - RNA, 22 nt, synthetic construct
  source 1..22: mol_type = other RNA
agttatgggagatcccacagcc

SEQ ID NO: 17173 - RNA, 22 nt, synthetic construct
  source 1..22: mol_type = other RNA
gagttatgggagatcccacagc

SEQ ID NO: 17174 - RNA, 22 nt, synthetic construct
  source 1..22: mol_type = other RNA
tctcccaactaggaaccacagc

SEQ ID NO: 17175 - RNA, 22 nt, synthetic construct
  source 1..22: mol_type = other RNA
ctaggcttcagttatctcccaa

SEQ ID NO: 17176 - RNA, 22 nt, synthetic construct
  source 1..22: mol_type = other RNA
cctaggcttcagttatctccca

SEQ ID NO: 17177 - RNA, 22 nt, synthetic construct
  source 1..22: mol_type = other RNA
caggatttcctaggcttcagtt

SEQ ID NO: 17178 - RNA, 22 nt, synthetic construct
  source 1..22: mol_type = other RNA
gtctatcttattccaggatttc

SEQ ID NO: 17179 - RNA, 22 nt, synthetic construct
  source 1..22: mol_type = other RNA
tcgatgcattggtctatcttat

SEQ ID NO: 17180 - RNA, 22 nt, synthetic construct
  source 1..22: mol_type = other RNA
gagctgagggttatcgatgcat

SEQ ID NO: 17181 - RNA, 22 nt, synthetic construct
  source 1..22: mol_type = other RNA
ggagctgagggttatcgatgca

SEQ ID NO: 17182 - RNA, 22 nt, synthetic construct
  source 1..22: mol_type = other RNA
ccaccagagtcagcttgtcctg

SEQ ID NO: 17183 - RNA, 22 nt, synthetic construct
  source 1..22: mol_type = other RNA
ctaatgaaagtgaaagctgctg

SEQ ID NO: 17184 - RNA, 22 nt, synthetic construct
  source 1..22: mol_type = other RNA
gtcccggttcctaatgaaagtg

SEQ ID NO: 17185 - RNA, 22 nt, synthetic construct
  source 1..22: mol_type = other RNA
ttcgtcccggttcctaatgaaa

SEQ ID NO: 17186 - RNA, 22 nt, synthetic construct
  source 1..22: mol_type = other RNA
gattattcgtcccggttcctaa

SEQ ID NO: 17187 - RNA, 22 nt, synthetic construct
  source 1..22: mol_type = other RNA
tggtgcagaggcagctcagttg

SEQ ID NO: 17188 - RNA, 22 nt, synthetic construct
  source 1..22: mol_type = other RNA
cccaggagcagggaatggggaa

SEQ ID NO: 17189 - RNA, 22 nt, synthetic construct
  source 1..22: mol_type = other RNA
ttgcccaggagcagggaatggg

SEQ ID NO: 17190 - RNA, 22 nt, synthetic construct
  source 1..22: mol_type = other RNA
attgttgcccaggagcagggaa

SEQ ID NO: 17191 - RNA, 22 nt, synthetic construct
  source 1..22: mol_type = other RNA
ctagagtgttaattgttgccca

SEQ ID NO: 17192 - RNA, 22 nt, synthetic construct
  source 1..22: mol_type = other RNA
cctagagtgttaattgttgccc

SEQ ID NO: 17193 - RNA, 22 nt, synthetic construct
  source 1..22: mol_type = other RNA
tcctagagtgttaattgttgcc

SEQ ID NO: 17194 - RNA, 22 nt, synthetic construct
  source 1..22: mol_type = other RNA
ttgctgccctgtggtccccagg

SEQ ID NO: 17195 - RNA, 22 nt, synthetic construct
  source 1..22: mol_type = other RNA
tatcctgtgagcagaagaggac

SEQ ID NO: 17196 - RNA, 22 nt, synthetic construct
  source 1..22: mol_type = other RNA
atatcctgtgagcagaagagga

SEQ ID NO: 17197 - RNA, 22 nt, synthetic construct
  source 1..22: mol_type = other RNA
tacccatgcccttgcaaatgta

SEQ ID NO: 17198 - RNA, 22 nt, synthetic construct
  source 1..22: mol_type = other RNA
atagtcggatacaatggaaagc

SEQ ID NO: 17199 - RNA, 22 nt, synthetic construct
  source 1..22: mol_type = other RNA
accactcatattcatagtcgga

SEQ ID NO: 17200 - RNA, 22 nt, synthetic construct
  source 1..22: mol_type = other RNA
atattaaccactcatattcata

SEQ ID NO: 17201 - RNA, 22 nt, synthetic construct
  source 1..22: mol_type = other RNA
ggtgagatatacataaagcact

SEQ ID NO: 17202 - RNA, 22 nt, synthetic construct
  source 1..22: mol_type = other RNA
tgaggattaggtgagatataca

SEQ ID NO: 17203 - RNA, 22 nt, synthetic construct
  source 1..22: mol_type = other RNA
ctcttctagaagatggaaataa

SEQ ID NO: 17204 - RNA, 22 nt, synthetic construct
  source 1..22: mol_type = other RNA
cctcttctagaagatggaaata

SEQ ID NO: 17205 - RNA, 22 nt, synthetic construct
  source 1..22: mol_type = other RNA
gtttcctcttctagaagatgga

SEQ ID NO: 17206 - RNA, 22 nt, synthetic construct
  source 1..22: mol_type = other RNA
acatcccagggtagctgtgacc

SEQ ID NO: 17207 - RNA, 22 nt, synthetic construct
  source 1..22: mol_type = other RNA
agagccagggccctgggttcac

SEQ ID NO: 17208 - RNA, 22 nt, synthetic construct
  source 1..22: mol_type = other RNA
gggtcatggttaagagccaggg

SEQ ID NO: 17209 - RNA, 22 nt, synthetic construct
  source 1..22: mol_type = other RNA
ctcaaacatttgctgagcacct

SEQ ID NO: 17210 - RNA, 22 nt, synthetic construct
  source 1..22: mol_type = other RNA
agttcctcaaacatttgctgag

SEQ ID NO: 17211 - RNA, 22 nt, synthetic construct
  source 1..22: mol_type = other RNA
tcttatgtgtggacccacataa

SEQ ID NO: 17212 - RNA, 22 nt, synthetic construct
  source 1..22: mol_type = other RNA
ctcttatgtgtggacccacata

SEQ ID NO: 17213 - RNA, 22 nt, synthetic construct
  source 1..22: mol_type = other RNA
tctcttatgtgtggacccacat

SEQ ID NO: 17214 - RNA, 22 nt, synthetic construct
  source 1..22: mol_type = other RNA
ttctcttatgtgtggacccaca

SEQ ID NO: 17215 - RNA, 22 nt, synthetic construct
  source 1..22: mol_type = other RNA
tttctcttatgtgtggacccac

SEQ ID NO: 17216 - RNA, 22 nt, synthetic construct
  source 1..22: mol_type = other RNA
ttttctcttatgtgtggaccca

SEQ ID NO: 17217 - RNA, 22 nt, synthetic construct
  source 1..22: mol_type = other RNA
tttttctcttatgtgtggaccc

SEQ ID NO: 17218 - RNA, 22 nt, synthetic construct
  source 1..22: mol_type = other RNA
ttttttctcttatgtgtggacc

SEQ ID NO: 17219 - RNA, 22 nt, synthetic construct
  source 1..22: mol_type = other RNA
tttttttctcttatgtgtggac

SEQ ID NO: 17220 - RNA, 22 nt, synthetic construct
  source 1..22: mol_type = other RNA
ttttttttctcttatgtgtgga

SEQ ID NO: 17221 - RNA, 22 nt, synthetic construct
  source 1..22: mol_type = other RNA
tttttttttctcttatgtgtgg

SEQ ID NO: 17222 - RNA, 22 nt, synthetic construct
  source 1..22: mol_type = other RNA
ttttttttttctcttatgtgtg

SEQ ID NO: 17223 - RNA, 22 nt, synthetic construct
  source 1..22: mol_type = other RNA
ctccctcttttttttttttttc

SEQ ID NO: 17224 - RNA, 22 nt, synthetic construct
  source 1..22: mol_type = other RNA
gctccctctttttttttttttt

SEQ ID NO: 17225 - RNA, 22 nt, synthetic construct
  source 1..22: mol_type = other RNA
cccacacgccaatccaggaaac

SEQ ID NO: 17226 - RNA, 22 nt, synthetic construct
  source 1..22: mol_type = other RNA
tcatgtggtcacatgtgttccc

SEQ ID NO: 17227 - RNA, 22 nt, synthetic construct
  source 1..22: mol_type = other RNA
tcagccattctcatgtggtcac

SEQ ID NO: 17228 - RNA, 22 nt, synthetic construct
  source 1..22: mol_type = other RNA
cataagcaggggaacgccggta

SEQ ID NO: 17229 - RNA, 22 nt, synthetic construct
  source 1..22: mol_type = other RNA
agcagaaacaccaggaaatatc

SEQ ID NO: 17230 - RNA, 22 nt, synthetic construct
  source 1..22: mol_type = other RNA
aagcagaaacaccaggaaatat

SEQ ID NO: 17231 - RNA, 22 nt, synthetic construct
  source 1..22: mol_type = other RNA
cagcaaacgctgtttaagcaga

SEQ ID NO: 17232 - RNA, 22 nt, synthetic construct
  source 1..22: mol_type = other RNA
gcagcaaacgctgtttaagcag

SEQ ID NO: 17233 - RNA, 22 nt, synthetic construct
  source 1..22: mol_type = other RNA
tgcagcaaacgctgtttaagca

SEQ ID NO: 17234 - RNA, 22 nt, synthetic construct
  source 1..22: mol_type = other RNA
tgaactaaaaactgaatcccaa

SEQ ID NO: 17235 - RNA, 22 nt, synthetic construct
  source 1..22: mol_type = other RNA
gcatattctgaactaaaaactg

SEQ ID NO: 17236 - RNA, 22 nt, synthetic construct
  source 1..22: mol_type = other RNA
ccacatcaacagaaacacttcc

SEQ ID NO: 17237 - RNA, 22 nt, synthetic construct
  source 1..22: mol_type = other RNA
tctctttaccacatcaacagaa

SEQ ID NO: 17238 - RNA, 22 nt, synthetic construct
  source 1..22: mol_type = other RNA
atctctttaccacatcaacaga

SEQ ID NO: 17239 - RNA, 22 nt, synthetic construct
  source 1..22: mol_type = other RNA
tatctctttaccacatcaacag

SEQ ID NO: 17240 - RNA, 22 nt, synthetic construct
  source 1..22: mol_type = other RNA
aagcagtgtaacttggtgagga

SEQ ID NO: 17241 - RNA, 22 nt, synthetic construct
  source 1..22: mol_type = other RNA
actttgaagcagtgtaacttgg

SEQ ID NO: 17242 - RNA, 22 nt, synthetic construct
  source 1..22: mol_type = other RNA
gactttgaagcagtgtaacttg

SEQ ID NO: 17243 - RNA, 22 nt, synthetic construct
  source 1..22: mol_type = other RNA
accctgcctgctcttctgccag

SEQ ID NO: 17244 - RNA, 22 nt, synthetic construct
  source 1..22: mol_type = other RNA
aacagactttgaccctgcctgc

SEQ ID NO: 17245 - RNA, 22 nt, synthetic construct
  source 1..22: mol_type = other RNA
catatgcactcactcattcaac

SEQ ID NO: 17246 - RNA, 22 nt, synthetic construct
  source 1..22: mol_type = other RNA
tatcgcactcctgtgtctaggc

SEQ ID NO: 17247 - RNA, 22 nt, synthetic construct
  source 1..22: mol_type = other RNA
attgtatcgcactcctgtgtct

SEQ ID NO: 17248 - RNA, 22 nt, synthetic construct
  source 1..22: mol_type = other RNA
aaaatctgtactgagcattgat

SEQ ID NO: 17249 - RNA, 22 nt, synthetic construct
  source 1..22: mol_type = other RNA
gtgaagatagagaaacatgaac

SEQ ID NO: 17250 - RNA, 22 nt, synthetic construct
  source 1..22: mol_type = other RNA
agtgaagatagagaaacatgaa

SEQ ID NO: 17251 - RNA, 22 nt, synthetic construct
  source 1..22: mol_type = other RNA
tccaggccagaggtgacagagg

SEQ ID NO: 17252 - RNA, 22 nt, synthetic construct
  source 1..22: mol_type = other RNA
gttgtccaggccagaggtgaca

SEQ ID NO: 17253 - RNA, 22 nt, synthetic construct
  source 1..22: mol_type = other RNA
tggacagaatgagctgaggggt

SEQ ID NO: 17254 - RNA, 22 nt, synthetic construct
  source 1..22: mol_type = other RNA
caaaaatgactctggcaattgt

SEQ ID NO: 17255 - RNA, 22 nt, synthetic construct
  source 1..22: mol_type = other RNA
gcaaaaatgactctggcaattg

SEQ ID NO: 17256 - RNA, 22 nt, synthetic construct
  source 1..22: mol_type = other RNA
tgcaaaaatgactctggcaatt

SEQ ID NO: 17257 - RNA, 22 nt, synthetic construct
  source 1..22: mol_type = other RNA
ccattttgcaaaaatgactctg

SEQ ID NO: 17258 - RNA, 22 nt, synthetic construct
  source 1..22: mol_type = other RNA
taggcaggagatgacacaatcc

SEQ ID NO: 17259 - RNA, 22 nt, synthetic construct
  source 1..22: mol_type = other RNA
gaaggttctaggcaggagatga

SEQ ID NO: 17260 - RNA, 22 nt, synthetic construct
  source 1..22: mol_type = other RNA
cgcaaccaaaaggaggcccatg

SEQ ID NO: 17261 - RNA, 22 nt, synthetic construct
  source 1..22: mol_type = other RNA
ccgcaaccaaaaggaggcccat

SEQ ID NO: 17262 - RNA, 22 nt, synthetic construct
  source 1..22: mol_type = other RNA
tccgcaaccaaaaggaggccca

SEQ ID NO: 17263 - RNA, 22 nt, synthetic construct
  source 1..22: mol_type = other RNA
ttccgcaaccaaaaggaggccc

SEQ ID NO: 17264 - RNA, 22 nt, synthetic construct
  source 1..22: mol_type = other RNA
gtttttccgcaaccaaaaggag

SEQ ID NO: 17265 - RNA, 22 nt, synthetic construct
  source 1..22: mol_type = other RNA
atagaaggatctggagaaaagc

SEQ ID NO: 17266 - RNA, 22 nt, synthetic construct
  source 1..22: mol_type = other RNA
gatagaaggatctggagaaaag

SEQ ID NO: 17267 - RNA, 22 nt, synthetic construct
  source 1..22: mol_type = other RNA
agctgagccttaatttgataga

SEQ ID NO: 17268 - RNA, 22 nt, synthetic construct
  source 1..22: mol_type = other RNA
gagctgagccttaatttgatag

SEQ ID NO: 17269 - RNA, 22 nt, synthetic construct
  source 1..22: mol_type = other RNA
gctgaggggtcagagaaagcct

SEQ ID NO: 17270 - RNA, 22 nt, synthetic construct
  source 1..22: mol_type = other RNA
actgccatgtcctcaacactta

SEQ ID NO: 17271 - RNA, 22 nt, synthetic construct
  source 1..22: mol_type = other RNA
tgttcactgccatgtcctcaac

SEQ ID NO: 17272 - RNA, 22 nt, synthetic construct
  source 1..22: mol_type = other RNA
ggaactatgaaggcaggcaaga

SEQ ID NO: 17273 - RNA, 22 nt, synthetic construct
  source 1..22: mol_type = other RNA
cggaactatgaaggcaggcaag

SEQ ID NO: 17274 - RNA, 22 nt, synthetic construct
  source 1..22: mol_type = other RNA
tcggaactatgaaggcaggcaa

SEQ ID NO: 17275 - RNA, 22 nt, synthetic construct
  source 1..22: mol_type = other RNA
ttcggaactatgaaggcaggca

SEQ ID NO: 17276 - RNA, 22 nt, synthetic construct
  source 1..22: mol_type = other RNA
tttcggaactatgaaggcaggc

SEQ ID NO: 17277 - RNA, 22 nt, synthetic construct
  source 1..22: mol_type = other RNA
gcacttggtgaggaagactagt

SEQ ID NO: 17278 - RNA, 22 nt, synthetic construct
  source 1..22: mol_type = other RNA
aacacagtgaacaagacagacc

SEQ ID NO: 17279 - RNA, 22 nt, synthetic construct
  source 1..22: mol_type = other RNA
agtacagtgcctggtgattgaa

SEQ ID NO: 17280 - RNA, 22 nt, synthetic construct
  source 1..22: mol_type = other RNA
gttcagtacagtgcctggtgat

SEQ ID NO: 17281 - RNA, 22 nt, synthetic construct
  source 1..22: mol_type = other RNA
cagaatgaatgcttgttggttc

SEQ ID NO: 17282 - RNA, 22 nt, synthetic construct
  source 1..22: mol_type = other RNA
acagaatgaatgcttgttggtt

SEQ ID NO: 17283 - RNA, 22 nt, synthetic construct
  source 1..22: mol_type = other RNA
ttttacagaatgaatgcttgtt

SEQ ID NO: 17284 - RNA, 22 nt, synthetic construct
  source 1..22: mol_type = other RNA
agctcagtaacatcttagcgag

SEQ ID NO: 17285 - RNA, 22 nt, synthetic construct
  source 1..22: mol_type = other RNA
aagaaaaagcttcagttgagct

SEQ ID NO: 17286 - RNA, 22 nt, synthetic construct
  source 1..22: mol_type = other RNA
tttgaagaaaaagcttcagttg

SEQ ID NO: 17287 - RNA, 22 nt, synthetic construct
  source 1..22: mol_type = other RNA
ctttgaagaaaaagcttcagtt

SEQ ID NO: 17288 - RNA, 22 nt, synthetic construct
  source 1..22: mol_type = other RNA
acagtgagatttctttgaagaa

SEQ ID NO: 17289 - RNA, 22 nt, synthetic construct
  source 1..22: mol_type = other RNA
cagatggtggtacagggtgggg

SEQ ID NO: 17290 - RNA, 22 nt, synthetic construct
  source 1..22: mol_type = other RNA
agtctgttgcagatggtggtac

SEQ ID NO: 17291 - RNA, 22 nt, synthetic construct
  source 1..22: mol_type = other RNA
aggagacacaaacattgagtct

SEQ ID NO: 17292 - RNA, 22 nt, synthetic construct
  source 1..22: mol_type = other RNA
gaggagacacaaacattgagtc

SEQ ID NO: 17293 - RNA, 22 nt, synthetic construct
  source 1..22: mol_type = other RNA
aacatatgaagtttgaggagac

SEQ ID NO: 17294 - RNA, 22 nt, synthetic construct
  source 1..22: mol_type = other RNA
caacatatgaagtttgaggaga

SEQ ID NO: 17295 - RNA, 22 nt, synthetic construct
  source 1..22: mol_type = other RNA
ggatcagagtttcaacatatga

SEQ ID NO: 17296 - RNA, 22 nt, synthetic construct
  source 1..22: mol_type = other RNA
gggatcagagtttcaacatatg

SEQ ID NO: 17297 - RNA, 22 nt, synthetic construct
  source 1..22: mol_type = other RNA
atcccacccatgaaggctctgc

SEQ ID NO: 17298 - RNA, 22 nt, synthetic construct
  source 1..22: mol_type = other RNA
ttataagggcattaatcccacc

SEQ ID NO: 17299 - RNA, 22 nt, synthetic construct
  source 1..22: mol_type = other RNA
tctcttactgttcttataaggg

SEQ ID NO: 17300 - RNA, 22 nt, synthetic construct
  source 1..22: mol_type = other RNA
atctcttactgttcttataagg

SEQ ID NO: 17301 - RNA, 22 nt, synthetic construct
  source 1..22: mol_type = other RNA
agtctgctataacagaacacca

SEQ ID NO: 17302 - RNA, 22 nt, synthetic construct
  source 1..22: mol_type = other RNA
ccaagacaaccacaggcagagg

SEQ ID NO: 17303 - RNA, 22 nt, synthetic construct
  source 1..22: mol_type = other RNA
cctggctttgccaagacaacca

SEQ ID NO: 17304 - RNA, 22 nt, synthetic construct
  source 1..22: mol_type = other RNA
accgcaagcaggctgagtccac

SEQ ID NO: 17305 - RNA, 22 nt, synthetic construct
  source 1..22: mol_type = other RNA
ggaaaatggacactaatgccat

SEQ ID NO: 17306 - RNA, 22 nt, synthetic construct
  source 1..22: mol_type = other RNA
gagagaacacgtgagccagaca

SEQ ID NO: 17307 - RNA, 22 nt, synthetic construct
  source 1..22: mol_type = other RNA
catccagcatccagcccactgt

SEQ ID NO: 17308 - RNA, 22 nt, synthetic construct
  source 1..22: mol_type = other RNA
gggctgtgacgagggagctttg

SEQ ID NO: 17309 - RNA, 22 nt, synthetic construct
  source 1..22: mol_type = other RNA
cactgagatggtcaagtcctgt

SEQ ID NO: 17310 - RNA, 22 nt, synthetic construct
  source 1..22: mol_type = other RNA
caagcgctcagggggctcttag

SEQ ID NO: 17311 - RNA, 22 nt, synthetic construct
  source 1..22: mol_type = other RNA
gcaagcgctcagggggctctta

SEQ ID NO: 17312 - RNA, 22 nt, synthetic construct
  source 1..22: mol_type = other RNA
tctgcagtgtttgcaagcgctc

SEQ ID NO: 17313 - RNA, 22 nt, synthetic construct
  source 1..22: mol_type = other RNA
taggctcccttcacagaacagg

SEQ ID NO: 17314 - RNA, 22 nt, synthetic construct
  source 1..22: mol_type = other RNA
gtaggctcccttcacagaacag

SEQ ID NO: 17315 - RNA, 22 nt, synthetic construct
  source 1..22: mol_type = other RNA
tgtaggctcccttcacagaaca

SEQ ID NO: 17316 - RNA, 22 nt, synthetic construct
  source 1..22: mol_type = other RNA
tgcagctcagaactgcaggggc

SEQ ID NO: 17317 - RNA, 22 nt, synthetic construct
  source 1..22: mol_type = other RNA
agggtgccccagctcatcagtt

SEQ ID NO: 17318 - RNA, 22 nt, synthetic construct
  source 1..22: mol_type = other RNA
cagggtgccccagctcatcagt

SEQ ID NO: 17319 - RNA, 22 nt, synthetic construct
  source 1..22: mol_type = other RNA
gagtcaggtttcagggtgcccc

SEQ ID NO: 17320 - RNA, 22 nt, synthetic construct
  source 1..22: mol_type = other RNA
ggagtcaggtttcagggtgccc

SEQ ID NO: 17321 - RNA, 22 nt, synthetic construct
  source 1..22: mol_type = other RNA
tggagtcaggtttcagggtgcc

SEQ ID NO: 17322 - RNA, 22 nt, synthetic construct
  source 1..22: mol_type = other RNA
ctgctattttggagtcaggttt

SEQ ID NO: 17323 - RNA, 22 nt, synthetic construct
  source 1..22: mol_type = other RNA
gctgctattttggagtcaggtt

SEQ ID NO: 17324 - RNA, 22 nt, synthetic construct
  source 1..22: mol_type = other RNA
gccttgggtttgctgctatttt

SEQ ID NO: 17325 - RNA, 22 nt, synthetic construct
  source 1..22: mol_type = other RNA
ggccttgggtttgctgctattt

SEQ ID NO: 17326 - RNA, 22 nt, synthetic construct
  source 1..22: mol_type = other RNA
agtgcaggggctctaggccaaa

SEQ ID NO: 17327 - RNA, 22 nt, synthetic construct
  source 1..22: mol_type = other RNA
tactgtggcccttggggtagct

SEQ ID NO: 17328 - RNA, 22 nt, synthetic construct
  source 1..22: mol_type = other RNA
ggggtgtcagaagacacaggga

SEQ ID NO: 17329 - RNA, 22 nt, synthetic construct
  source 1..22: mol_type = other RNA
aggggtgtcagaagacacaggg

SEQ ID NO: 17330 - RNA, 22 nt, synthetic construct
  source 1..22: mol_type = other RNA
tcgcttgtcctagaaggataaa

SEQ ID NO: 17331 - RNA, 22 nt, synthetic construct
  source 1..22: mol_type = other RNA
ggggattctcgcttgtcctaga

SEQ ID NO: 17332 - RNA, 22 nt, synthetic construct
  source 1..22: mol_type = other RNA
gggggattctcgcttgtcctag

SEQ ID NO: 17333 - RNA, 22 nt, synthetic construct
  source 1..22: mol_type = other RNA
aggcagagctgtcagctcctcc

SEQ ID NO: 17334 - RNA, 22 nt, synthetic construct
  source 1..22: mol_type = other RNA
gaggcagagctgtcagctcctc

SEQ ID NO: 17335 - RNA, 22 nt, synthetic construct
  source 1..22: mol_type = other RNA
gggtagctctgtgacttacccc

SEQ ID NO: 17336 - RNA, 22 nt, synthetic construct
  source 1..22: mol_type = other RNA
ggggtagctctgtgacttaccc

SEQ ID NO: 17337 - RNA, 22 nt, synthetic construct
  source 1..22: mol_type = other RNA
catttggggtagctctgtgact

SEQ ID NO: 17338 - RNA, 22 nt, synthetic construct
  source 1..22: mol_type = other RNA
ggctggaaagcttcctccagca

SEQ ID NO: 17339 - RNA, 22 nt, synthetic construct
  source 1..22: mol_type = other RNA
gggctggaaagcttcctccagc

SEQ ID NO: 17340 - RNA, 22 nt, synthetic construct
  source 1..22: mol_type = other RNA
acctcctccaggtctaactgga

SEQ ID NO: 17341 - RNA, 22 nt, synthetic construct
  source 1..22: mol_type = other RNA
ccaggccggatacacacccctc

SEQ ID NO: 17342 - RNA, 22 nt, synthetic construct
  source 1..22: mol_type = other RNA
gggcgctagcaagggagaggga

SEQ ID NO: 17343 - RNA, 22 nt, synthetic construct
  source 1..22: mol_type = other RNA
cccaggaggagaccctcccctg

SEQ ID NO: 17344 - RNA, 22 nt, synthetic construct
  source 1..22: mol_type = other RNA
ggggcaccatctggacggggat

SEQ ID NO: 17345 - RNA, 22 nt, synthetic construct
  source 1..22: mol_type = other RNA
ccctcttccctacacgatccgc

SEQ ID NO: 17346 - RNA, 22 nt, synthetic construct
  source 1..22: mol_type = other RNA
atgcgtacttggagtagggtct

SEQ ID NO: 17347 - RNA, 22 nt, synthetic construct
  source 1..22: mol_type = other RNA
cgatgctgactcggagctcgac

SEQ ID NO: 17348 - RNA, 22 nt, synthetic construct
  source 1..22: mol_type = other RNA
ttcgtcaatgtgctgatcctgt

SEQ ID NO: 17349 - RNA, 22 nt, synthetic construct
  source 1..22: mol_type = other RNA
tacgtgggcctgttcttcgtca

SEQ ID NO: 17350 - RNA, 22 nt, synthetic construct
  source 1..22: mol_type = other RNA
gccgggatcgccgggccgccgc

SEQ ID NO: 17351 - RNA, 22 nt, synthetic construct
  source 1..22: mol_type = other RNA
ccaggggacatctggagcccgg

SEQ ID NO: 17352 - RNA, 22 nt, synthetic construct
  source 1..22: mol_type = other RNA
gggggtcggggcgcaattgcca

SEQ ID NO: 17353 - RNA, 22 nt, synthetic construct
  source 1..22: mol_type = other RNA
cgggggtcggggcgcaattgcc

SEQ ID NO: 17354 - RNA, 22 nt, synthetic construct
  source 1..22: mol_type = other RNA
gcgcgtgcagggggcggcctgc

SEQ ID NO: 17355 - RNA, 22 nt, synthetic construct
  source 1..22: mol_type = other RNA
agccggccaattagcgcgtgca

SEQ ID NO: 17356 - RNA, 22 nt, synthetic construct
  source 1..22: mol_type = other RNA
agatctgagggcagacccgaac

SEQ ID NO: 17357 - RNA, 22 nt, synthetic construct
  source 1..22: mol_type = other RNA
gagatctgagggcagacccgaa

SEQ ID NO: 17358 - RNA, 22 nt, synthetic construct
  source 1..22: mol_type = other RNA
gatttgagatctgagggcagac

SEQ ID NO: 17359 - RNA, 22 nt, synthetic construct
  source 1..22: mol_type = other RNA
gatacgcagagcgaattcgatt

SEQ ID NO: 17360 - RNA, 22 nt, synthetic construct
  source 1..22: mol_type = other RNA
cctccccctattcgatacgcag

SEQ ID NO: 17361 - RNA, 22 nt, synthetic construct
  source 1..22: mol_type = other RNA
acctccccctattcgatacgca

SEQ ID NO: 17362 - RNA, 22 nt, synthetic construct
  source 1..22: mol_type = other RNA
agtctcttttacctccccctat

SEQ ID NO: 17363 - RNA, 22 nt, synthetic construct
  source 1..22: mol_type = other RNA
aactgtgttcagtctcttttac

SEQ ID NO: 17364 - RNA, 22 nt, synthetic construct
  source 1..22: mol_type = other RNA
gaactgtgttcagtctctttta

SEQ ID NO: 17365 - RNA, 22 nt, synthetic construct
  source 1..22: mol_type = other RNA
tgtctaggtttgaactgtgttc

SEQ ID NO: 17366 - RNA, 22 nt, synthetic construct
  source 1..22: mol_type = other RNA
cggccttagcattatgtctagg

SEQ ID NO: 17367 - RNA, 22 nt, synthetic construct
  source 1..22: mol_type = other RNA
gcggccttagcattatgtctag

SEQ ID NO: 17368 - RNA, 22 nt, synthetic construct
  source 1..22: mol_type = other RNA
cttcggcttttgcggccttagc

SEQ ID NO: 17369 - RNA, 22 nt, synthetic construct
  source 1..22: mol_type = other RNA
ccttcggcttttgcggccttag

SEQ ID NO: 17370 - RNA, 22 nt, synthetic construct
  source 1..22: mol_type = other RNA
aaggagaaacggagtcccaaag

SEQ ID NO: 17371 - RNA, 22 nt, synthetic construct
  source 1..22: mol_type = other RNA
aaaggagaaacggagtcccaaa

SEQ ID NO: 17372 - RNA, 22 nt, synthetic construct
  source 1..22: mol_type = other RNA
cagggcaaccgtccgtcgcccc

SEQ ID NO: 17373 - RNA, 22 nt, synthetic construct
  source 1..22: mol_type = other RNA
ccagggcaaccgtccgtcgccc

SEQ ID NO: 17374 - RNA, 22 nt, synthetic construct
  source 1..22: mol_type = other RNA
ggaatgtccaaaatttccaggg

SEQ ID NO: 17375 - RNA, 22 nt, synthetic construct
  source 1..22: mol_type = other RNA
gcgctttgggaatgtccaaaat

SEQ ID NO: 17376 - RNA, 22 nt, synthetic construct
  source 1..22: mol_type = other RNA
gagaagcgaaggggacactggt

SEQ ID NO: 17377 - RNA, 22 nt, synthetic construct
  source 1..22: mol_type = other RNA
ggagaagcgaaggggacactgg

SEQ ID NO: 17378 - RNA, 22 nt, synthetic construct
  source 1..22: mol_type = other RNA
cgtagtgggcggaccttccagc

SEQ ID NO: 17379 - RNA, 22 nt, synthetic construct
  source 1..22: mol_type = other RNA
cttaactctaggatgcaggttc

SEQ ID NO: 17380 - RNA, 22 nt, synthetic construct
  source 1..22: mol_type = other RNA
aggtgttccttaactctaggat

SEQ ID NO: 17381 - RNA, 22 nt, synthetic construct
  source 1..22: mol_type = other RNA
ttcaggtgttccttaactctag

SEQ ID NO: 17382 - RNA, 22 nt, synthetic construct
  source 1..22: mol_type = other RNA
aagatctgaactacctcggaat

SEQ ID NO: 17383 - RNA, 22 nt, synthetic construct
  source 1..22: mol_type = other RNA
caggcactggccagggcagctg

SEQ ID NO: 17384 - RNA, 22 nt, synthetic construct
  source 1..22: mol_type = other RNA
accctactagagaaaggagacc

SEQ ID NO: 17385 - RNA, 22 nt, synthetic construct
  source 1..22: mol_type = other RNA
ggccctcctggggtgggcccgg

SEQ ID NO: 17386 - RNA, 22 nt, synthetic construct
  source 1..22: mol_type = other RNA
gccctcctggggtgggcccgga

SEQ ID NO: 17387 - RNA, 22 nt, synthetic construct
  source 1..22: mol_type = other RNA
gcatcacttttaatcaaggaga

SEQ ID NO: 17388 - RNA, 22 nt, synthetic construct
  source 1..22: mol_type = other RNA
aatcaaggagaaatgacagact

SEQ ID NO: 17389 - RNA, 22 nt, synthetic construct
  source 1..22: mol_type = other RNA
atcaaggagaaatgacagactg

SEQ ID NO: 17390 - RNA, 22 nt, synthetic construct
  source 1..22: mol_type = other RNA
tccctcctctctgaaagggaag

SEQ ID NO: 17391 - RNA, 22 nt, synthetic construct
  source 1..22: mol_type = other RNA
ccctcctctctgaaagggaagt

SEQ ID NO: 17392 - RNA, 22 nt, synthetic construct
  source 1..22: mol_type = other RNA
cctcctctctgaaagggaagtc

SEQ ID NO: 17393 - RNA, 22 nt, synthetic construct
  source 1..22: mol_type = other RNA
ctgggtgtgctggagcgaacgg

SEQ ID NO: 17394 - RNA, 22 nt, synthetic construct
  source 1..22: mol_type = other RNA
actccctgagccctgacgatac

SEQ ID NO: 17395 - RNA, 22 nt, synthetic construct
  source 1..22: mol_type = other RNA
acggggcatggatggacagatc

SEQ ID NO: 17396 - RNA, 22 nt, synthetic construct
  source 1..22: mol_type = other RNA
tgggaggccaaggcaggtggat

SEQ ID NO: 17397 - RNA, 22 nt, synthetic construct
  source 1..22: mol_type = other RNA
gggaggccaaggcaggtggatc

SEQ ID NO: 17398 - RNA, 22 nt, synthetic construct
  source 1..22: mol_type = other RNA
ggaggccaaggcaggtggatca

SEQ ID NO: 17399 - RNA, 22 nt, synthetic construct
  source 1..22: mol_type = other RNA
gacaccagcctggccaacatgg

SEQ ID NO: 17400 - RNA, 22 nt, synthetic construct
  source 1..22: mol_type = other RNA
cttgaactgggaaggcagaggt

SEQ ID NO: 17401 - RNA, 22 nt, synthetic construct
  source 1..22: mol_type = other RNA
caatgagccgagatcacgctac

SEQ ID NO: 17402 - RNA, 22 nt, synthetic construct
  source 1..22: mol_type = other RNA
ggggggggcatgtgtgcgtttg

SEQ ID NO: 17403 - RNA, 22 nt, synthetic construct
  source 1..22: mol_type = other RNA
gcatgcatttgcttgtgtgtgc

SEQ ID NO: 17404 - RNA, 22 nt, synthetic construct
  source 1..22: mol_type = other RNA
catgcatttgcttgtgtgtgca

SEQ ID NO: 17405 - RNA, 22 nt, synthetic construct
  source 1..22: mol_type = other RNA
gcttgtgtgtgcatgtgtgtgt

SEQ ID NO: 17406 - RNA, 22 nt, synthetic construct
  source 1..22: mol_type = other RNA
cttgtgtgtgcatgtgtgtgtc

SEQ ID NO: 17407 - RNA, 22 nt, synthetic construct
  source 1..22: mol_type = other RNA
ttaagagcgttggtggcacaca

SEQ ID NO: 17408 - RNA, 22 nt, synthetic construct
  source 1..22: mol_type = other RNA
taagagcgttggtggcacacaa

SEQ ID NO: 17409 - RNA, 22 nt, synthetic construct
  source 1..22: mol_type = other RNA
aagagcgttggtggcacacaat

SEQ ID NO: 17410 - RNA, 22 nt, synthetic construct
  source 1..22: mol_type = other RNA
agagcgttggtggcacacaatc

SEQ ID NO: 17411 - RNA, 22 nt, synthetic construct
  source 1..22: mol_type = other RNA
gtggcacacaatcatctcaaac

SEQ ID NO: 17412 - RNA, 22 nt, synthetic construct
  source 1..22: mol_type = other RNA
cactcacatccttggctcctcc

SEQ ID NO: 17413 - RNA, 22 nt, synthetic construct
  source 1..22: mol_type = other RNA
tacgtctcctacccacttacaa

SEQ ID NO: 17414 - RNA, 22 nt, synthetic construct
  source 1..22: mol_type = other RNA
acgtctcctacccacttacaaa

SEQ ID NO: 17415 - RNA, 22 nt, synthetic construct
  source 1..22: mol_type = other RNA
cgtctcctacccacttacaaag

SEQ ID NO: 17416 - RNA, 22 nt, synthetic construct
  source 1..22: mol_type = other RNA
taatgtcacaactttctttctt

SEQ ID NO: 17417 - RNA, 22 nt, synthetic construct
  source 1..22: mol_type = other RNA
tttctttttttgagacggggtc

SEQ ID NO: 17418 - RNA, 22 nt, synthetic construct
  source 1..22: mol_type = other RNA
tttttttgagacggggtctgtt

SEQ ID NO: 17419 - RNA, 22 nt, synthetic construct
  source 1..22: mol_type = other RNA
tttgagacggggtctgttctct

SEQ ID NO: 17420 - RNA, 22 nt, synthetic construct
  source 1..22: mol_type = other RNA
ttgagacggggtctgttctctt

SEQ ID NO: 17421 - RNA, 22 nt, synthetic construct
  source 1..22: mol_type = other RNA
tgagacggggtctgttctcttg

SEQ ID NO: 17422 - RNA, 22 nt, synthetic construct
  source 1..22: mol_type = other RNA
gagacggggtctgttctcttgc

SEQ ID NO: 17423 - RNA, 22 nt, synthetic construct
  source 1..22: mol_type = other RNA
agacggggtctgttctcttgcc

SEQ ID NO: 17424 - RNA, 22 nt, synthetic construct
  source 1..22: mol_type = other RNA
tcttgcccaggctggagtgtag

SEQ ID NO: 17425 - RNA, 22 nt, synthetic construct
  source 1..22: mol_type = other RNA
gcggtgcttaagtgatcctccc

SEQ ID NO: 17426 - RNA, 22 nt, synthetic construct
  source 1..22: mol_type = other RNA
cggtgcttaagtgatcctccca

SEQ ID NO: 17427 - RNA, 22 nt, synthetic construct
  source 1..22: mol_type = other RNA
ttttttaattattttttgtaga

SEQ ID NO: 17428 - RNA, 22 nt, synthetic construct
  source 1..22: mol_type = other RNA
tttttaattattttttgtagag

SEQ ID NO: 17429 - RNA, 22 nt, synthetic construct
  source 1..22: mol_type = other RNA
ttttaattattttttgtagaga

SEQ ID NO: 17430 - RNA, 22 nt, synthetic construct
  source 1..22: mol_type = other RNA
tttaattattttttgtagagat

SEQ ID NO: 17431 - RNA, 22 nt, synthetic construct
  source 1..22: mol_type = other RNA
ttaattattttttgtagagatg

SEQ ID NO: 17432 - RNA, 22 nt, synthetic construct
  source 1..22: mol_type = other RNA
taattattttttgtagagatga

SEQ ID NO: 17433 - RNA, 22 nt, synthetic construct
  source 1..22: mol_type = other RNA
aattattttttgtagagatgag

SEQ ID NO: 17434 - RNA, 22 nt, synthetic construct
  source 1..22: mol_type = other RNA
attattttttgtagagatgagg

SEQ ID NO: 17435 - RNA, 22 nt, synthetic construct
  source 1..22: mol_type = other RNA
ttttttgtagagatgaggtctc

SEQ ID NO: 17436 - RNA, 22 nt, synthetic construct
  source 1..22: mol_type = other RNA
tttgtagagatgaggtctcact

SEQ ID NO: 17437 - RNA, 22 nt, synthetic construct
  source 1..22: mol_type = other RNA
ttgtagagatgaggtctcacta

SEQ ID NO: 17438 - RNA, 22 nt, synthetic construct
  source 1..22: mol_type = other RNA
tgtagagatgaggtctcactat

SEQ ID NO: 17439 - RNA, 22 nt, synthetic construct
  source 1..22: mol_type = other RNA
gtagagatgaggtctcactatg

SEQ ID NO: 17440 - RNA, 22 nt, synthetic construct
  source 1..22: mol_type = other RNA
tagagatgaggtctcactatgt

SEQ ID NO: 17441 - RNA, 22 nt, synthetic construct
  source 1..22: mol_type = other RNA
accaggctgcttgcgaacccct

SEQ ID NO: 17442 - RNA, 22 nt, synthetic construct
  source 1..22: mol_type = other RNA
ctgggcttacaggcatgagcca

SEQ ID NO: 17443 - RNA, 22 nt, synthetic construct
  source 1..22: mol_type = other RNA
taaagacggtgtttgttccatc

SEQ ID NO: 17444 - RNA, 22 nt, synthetic construct
  source 1..22: mol_type = other RNA
gttccatctccttctgaaatgc

SEQ ID NO: 17445 - RNA, 22 nt, synthetic construct
  source 1..22: mol_type = other RNA
ttccatctccttctgaaatgca

SEQ ID NO: 17446 - RNA, 22 nt, synthetic construct
  source 1..22: mol_type = other RNA
catctccttctgaaatgcaagt

SEQ ID NO: 17447 - RNA, 22 nt, synthetic construct
  source 1..22: mol_type = other RNA
acattgattatttagtgtgcca

SEQ ID NO: 17448 - RNA, 22 nt, synthetic construct
  source 1..22: mol_type = other RNA
attatttagtgtgccagaaaca

SEQ ID NO: 17449 - RNA, 22 nt, synthetic construct
  source 1..22: mol_type = other RNA
tttagtgtgccagaaacagcct

SEQ ID NO: 17450 - RNA, 22 nt, synthetic construct
  source 1..22: mol_type = other RNA
agtgtgccagaaacagcctaag

SEQ ID NO: 17451 - RNA, 22 nt, synthetic construct
  source 1..22: mol_type = other RNA
gtgtgccagaaacagcctaagc

SEQ ID NO: 17452 - RNA, 22 nt, synthetic construct
  source 1..22: mol_type = other RNA
atccccatccttatttaacact

SEQ ID NO: 17453 - RNA, 22 nt, synthetic construct
  source 1..22: mol_type = other RNA
aacacttaaagaagaaaacaga

SEQ ID NO: 17454 - RNA, 22 nt, synthetic construct
  source 1..22: mol_type = other RNA
acacttaaagaagaaaacagac

SEQ ID NO: 17455 - RNA, 22 nt, synthetic construct
  source 1..22: mol_type = other RNA
gaagacagacaagctttgatct

SEQ ID NO: 17456 - RNA, 22 nt, synthetic construct
  source 1..22: mol_type = other RNA
aagacagacaagctttgatctt

SEQ ID NO: 17457 - RNA, 22 nt, synthetic construct
  source 1..22: mol_type = other RNA
atcttcaacttagccttcaggg

SEQ ID NO: 17458 - RNA, 22 nt, synthetic construct
  source 1..22: mol_type = other RNA
tggcggccttatcttgggcacc

SEQ ID NO: 17459 - RNA, 22 nt, synthetic construct
  source 1..22: mol_type = other RNA
ggcggccttatcttgggcacca

SEQ ID NO: 17460 - RNA, 22 nt, synthetic construct
  source 1..22: mol_type = other RNA
gcggccttatcttgggcaccag

SEQ ID NO: 17461 - RNA, 22 nt, synthetic construct
  source 1..22: mol_type = other RNA
tttaccagctttcctgccaaga

SEQ ID NO: 17462 - RNA, 22 nt, synthetic construct
  source 1..22: mol_type = other RNA
accagctttcctgccaagacaa

SEQ ID NO: 17463 - RNA, 22 nt, synthetic construct
  source 1..22: mol_type = other RNA
ccagctttcctgccaagacaac

SEQ ID NO: 17464 - RNA, 22 nt, synthetic construct
  source 1..22: mol_type = other RNA
ctgccaagacaacatttctaca

SEQ ID NO: 17465 - RNA, 22 nt, synthetic construct
  source 1..22: mol_type = other RNA
ctacagggctggttcttcttgt

SEQ ID NO: 17466 - RNA, 22 nt, synthetic construct
  source 1..22: mol_type = other RNA
tacagggctggttcttcttgtg

SEQ ID NO: 17467 - RNA, 22 nt, synthetic construct
  source 1..22: mol_type = other RNA
ttcttgtggtcaaattctcacc

SEQ ID NO: 17468 - RNA, 22 nt, synthetic construct
  source 1..22: mol_type = other RNA
tcacccaagtggtttccatcgt

SEQ ID NO: 17469 - RNA, 22 nt, synthetic construct
  source 1..22: mol_type = other RNA
ccatcgtctattggactcctct

SEQ ID NO: 17470 - RNA, 22 nt, synthetic construct
  source 1..22: mol_type = other RNA
catcgtctattggactcctctt

SEQ ID NO: 17471 - RNA, 22 nt, synthetic construct
  source 1..22: mol_type = other RNA
gactcctctttaattctcttcc

SEQ ID NO: 17472 - RNA, 22 nt, synthetic construct
  source 1..22: mol_type = other RNA
attctcttcctcctaacagtca

SEQ ID NO: 17473 - RNA, 22 nt, synthetic construct
  source 1..22: mol_type = other RNA
tcttcctcctaacagtcaccta

SEQ ID NO: 17474 - RNA, 22 nt, synthetic construct
  source 1..22: mol_type = other RNA
ccacccaaacattctcccttgg

SEQ ID NO: 17475 - RNA, 22 nt, synthetic construct
  source 1..22: mol_type = other RNA
tcccttggcttctcaacagggg

SEQ ID NO: 17476 - RNA, 22 nt, synthetic construct
  source 1..22: mol_type = other RNA
cgagagtgctggttcctgttat

SEQ ID NO: 17477 - RNA, 22 nt, synthetic construct
  source 1..22: mol_type = other RNA
ctgttatttaactctgtttcct

SEQ ID NO: 17478 - RNA, 22 nt, synthetic construct
  source 1..22: mol_type = other RNA
tttaactctgtttcctccctcg

SEQ ID NO: 17479 - RNA, 22 nt, synthetic construct
  source 1..22: mol_type = other RNA
aactctgtttcctccctcggga

SEQ ID NO: 17480 - RNA, 22 nt, synthetic construct
  source 1..22: mol_type = other RNA
actctgtttcctccctcgggag

SEQ ID NO: 17481 - RNA, 22 nt, synthetic construct
  source 1..22: mol_type = other RNA
cctccctcgggaggtaatatat

SEQ ID NO: 17482 - RNA, 22 nt, synthetic construct
  source 1..22: mol_type = other RNA
ctccctcgggaggtaatatatt

SEQ ID NO: 17483 - RNA, 22 nt, synthetic construct
  source 1..22: mol_type = other RNA
atttctgatcccacgtgactcc

SEQ ID NO: 17484 - RNA, 22 nt, synthetic construct
  source 1..22: mol_type = other RNA
tttctgatcccacgtgactcca

SEQ ID NO: 17485 - RNA, 22 nt, synthetic construct
  source 1..22: mol_type = other RNA
ctgatcccacgtgactccagaa

SEQ ID NO: 17486 - RNA, 22 nt, synthetic construct
  source 1..22: mol_type = other RNA
tgatcccacgtgactccagaaa

SEQ ID NO: 17487 - RNA, 22 nt, synthetic construct
  source 1..22: mol_type = other RNA
ctcttttcctgctttctctttc

SEQ ID NO: 17488 - RNA, 22 nt, synthetic construct
  source 1..22: mol_type = other RNA
cctgctttctctttctgccctc

SEQ ID NO: 17489 - RNA, 22 nt, synthetic construct
  source 1..22: mol_type = other RNA
ctgctttctctttctgccctcc

SEQ ID NO: 17490 - RNA, 22 nt, synthetic construct
  source 1..22: mol_type = other RNA
tctttctgccctccagccagct

SEQ ID NO: 17491 - RNA, 22 nt, synthetic construct
  source 1..22: mol_type = other RNA
tgccctccagccagcttccctc

SEQ ID NO: 17492 - RNA, 22 nt, synthetic construct
  source 1..22: mol_type = other RNA
catggtttgtaaacaaagggca

SEQ ID NO: 17493 - RNA, 22 nt, synthetic construct
  source 1..22: mol_type = other RNA
gtaaacaaagggcactgacttt

SEQ ID NO: 17494 - RNA, 22 nt, synthetic construct
  source 1..22: mol_type = other RNA
taaacaaagggcactgactttc

SEQ ID NO: 17495 - RNA, 22 nt, synthetic construct
  source 1..22: mol_type = other RNA
attttgatgggggttcggaaaa

SEQ ID NO: 17496 - RNA, 22 nt, synthetic construct
  source 1..22: mol_type = other RNA
tgatgggggttcggaaaaggaa

SEQ ID NO: 17497 - RNA, 22 nt, synthetic construct
  source 1..22: mol_type = other RNA
gatgggggttcggaaaaggaaa

SEQ ID NO: 17498 - RNA, 22 nt, synthetic construct
  source 1..22: mol_type = other RNA
atgggggttcggaaaaggaaat

SEQ ID NO: 17499 - RNA, 22 nt, synthetic construct
  source 1..22: mol_type = other RNA
ggaaaaggaaatcatccatgtg

SEQ ID NO: 17500 - RNA, 22 nt, synthetic construct
  source 1..22: mol_type = other RNA
ttgtgaccctccctctcaacca

SEQ ID NO: 17501 - RNA, 22 nt, synthetic construct
  source 1..22: mol_type = other RNA
tgtgaccctccctctcaaccac

SEQ ID NO: 17502 - RNA, 22 nt, synthetic construct
  source 1..22: mol_type = other RNA
gtgaccctccctctcaaccact

SEQ ID NO: 17503 - RNA, 22 nt, synthetic construct
  source 1..22: mol_type = other RNA
tgaccctccctctcaaccactc

SEQ ID NO: 17504 - RNA, 22 nt, synthetic construct
  source 1..22: mol_type = other RNA
ctcagagaaaaagctaaatctg

SEQ ID NO: 17505 - RNA, 22 nt, synthetic construct
  source 1..22: mol_type = other RNA
ctacctcatcagctccctgctc

SEQ ID NO: 17506 - RNA, 22 nt, synthetic construct
  source 1..22: mol_type = other RNA
atctactccagccatgttggca

SEQ ID NO: 17507 - RNA, 22 nt, synthetic construct
  source 1..22: mol_type = other RNA
gcaccctcgctgttccttagac

SEQ ID NO: 17508 - RNA, 22 nt, synthetic construct
  source 1..22: mol_type = other RNA
cttagacacgctcagcacactg

SEQ ID NO: 17509 - RNA, 22 nt, synthetic construct
  source 1..22: mol_type = other RNA
cacatgccgttccctctgcctg

SEQ ID NO: 17510 - RNA, 22 nt, synthetic construct
  source 1..22: mol_type = other RNA
cctctgcctggagcactgttct

SEQ ID NO: 17511 - RNA, 22 nt, synthetic construct
  source 1..22: mol_type = other RNA
tctaagcattttcttggtcaac

SEQ ID NO: 17512 - RNA, 22 nt, synthetic construct
  source 1..22: mol_type = other RNA
tcttggtcaacctcctaaattc

SEQ ID NO: 17513 - RNA, 22 nt, synthetic construct
  source 1..22: mol_type = other RNA
cttggtcaacctcctaaattcc

SEQ ID NO: 17514 - RNA, 22 nt, synthetic construct
  source 1..22: mol_type = other RNA
ttggtcaacctcctaaattcct

SEQ ID NO: 17515 - RNA, 22 nt, synthetic construct
  source 1..22: mol_type = other RNA
cttctattctttgcaccttatc

SEQ ID NO: 17516 - RNA, 22 nt, synthetic construct
  source 1..22: mol_type = other RNA
tttgcaccttatcaatgaagcc

SEQ ID NO: 17517 - RNA, 22 nt, synthetic construct
  source 1..22: mol_type = other RNA
caccttatcaatgaagcctgcc

SEQ ID NO: 17518 - RNA, 22 nt, synthetic construct
  source 1..22: mol_type = other RNA
agaattgcaactcctccctcca

SEQ ID NO: 17519 - RNA, 22 nt, synthetic construct
  source 1..22: mol_type = other RNA
gaattgcaactcctccctccac

SEQ ID NO: 17520 - RNA, 22 nt, synthetic construct
  source 1..22: mol_type = other RNA
caactcctccctccacactctg

SEQ ID NO: 17521 - RNA, 22 nt, synthetic construct
  source 1..22: mol_type = other RNA
attttttccccacttttttttt

SEQ ID NO: 17522 - RNA, 22 nt, synthetic construct
  source 1..22: mol_type = other RNA
tttccccacttttttttttttt

SEQ ID NO: 17523 - RNA, 22 nt, synthetic construct
  source 1..22: mol_type = other RNA
ttccccactttttttttttttg

SEQ ID NO: 17524 - RNA, 22 nt, synthetic construct
  source 1..22: mol_type = other RNA
tccccactttttttttttttga

SEQ ID NO: 17525 - RNA, 22 nt, synthetic construct
  source 1..22: mol_type = other RNA
ccccactttttttttttttgat

SEQ ID NO: 17526 - RNA, 22 nt, synthetic construct
  source 1..22: mol_type = other RNA
cccactttttttttttttgata

SEQ ID NO: 17527 - RNA, 22 nt, synthetic construct
  source 1..22: mol_type = other RNA
tttttttttgatacagagtctt

SEQ ID NO: 17528 - RNA, 22 nt, synthetic construct
  source 1..22: mol_type = other RNA
ttttttttgatacagagtcttg

SEQ ID NO: 17529 - RNA, 22 nt, synthetic construct
  source 1..22: mol_type = other RNA
tttttttgatacagagtcttgc

SEQ ID NO: 17530 - RNA, 22 nt, synthetic construct
  source 1..22: mol_type = other RNA
ttttttgatacagagtcttgct

SEQ ID NO: 17531 - RNA, 22 nt, synthetic construct
  source 1..22: mol_type = other RNA
tttttgatacagagtcttgctc

SEQ ID NO: 17532 - RNA, 22 nt, synthetic construct
  source 1..22: mol_type = other RNA
ttttgatacagagtcttgctct

SEQ ID NO: 17533 - RNA, 22 nt, synthetic construct
  source 1..22: mol_type = other RNA
tttgatacagagtcttgctcta

SEQ ID NO: 17534 - RNA, 22 nt, synthetic construct
  source 1..22: mol_type = other RNA
ttgatacagagtcttgctctat

SEQ ID NO: 17535 - RNA, 22 nt, synthetic construct
  source 1..22: mol_type = other RNA
tgatacagagtcttgctctatc

SEQ ID NO: 17536 - RNA, 22 nt, synthetic construct
  source 1..22: mol_type = other RNA
gatacagagtcttgctctatcg

SEQ ID NO: 17537 - RNA, 22 nt, synthetic construct
  source 1..22: mol_type = other RNA
atacagagtcttgctctatcgc

SEQ ID NO: 17538 - RNA, 22 nt, synthetic construct
  source 1..22: mol_type = other RNA
atgcagttctcatgcctcagcc

SEQ ID NO: 17539 - RNA, 22 nt, synthetic construct
  source 1..22: mol_type = other RNA
tcatgcctcagcctcccaaata

SEQ ID NO: 17540 - RNA, 22 nt, synthetic construct
  source 1..22: mol_type = other RNA
caggtttgtgccactatgcctg

SEQ ID NO: 17541 - RNA, 22 nt, synthetic construct
  source 1..22: mol_type = other RNA
gtgccactatgcctggctaatt

SEQ ID NO: 17542 - RNA, 22 nt, synthetic construct
  source 1..22: mol_type = other RNA
tgccactatgcctggctaattt

SEQ ID NO: 17543 - RNA, 22 nt, synthetic construct
  source 1..22: mol_type = other RNA
ttgtatttttagagacagggtt

SEQ ID NO: 17544 - RNA, 22 nt, synthetic construct
  source 1..22: mol_type = other RNA
tgtatttttagagacagggttt

SEQ ID NO: 17545 - RNA, 22 nt, synthetic construct
  source 1..22: mol_type = other RNA
gtatttttagagacagggtttc

SEQ ID NO: 17546 - RNA, 22 nt, synthetic construct
  source 1..22: mol_type = other RNA
tatttttagagacagggtttct

SEQ ID NO: 17547 - RNA, 22 nt, synthetic construct
  source 1..22: mol_type = other RNA
ttagagacagggtttctccaag

SEQ ID NO: 17548 - RNA, 22 nt, synthetic construct
  source 1..22: mol_type = other RNA
tagagacagggtttctccaagt

SEQ ID NO: 17549 - RNA, 22 nt, synthetic construct
  source 1..22: mol_type = other RNA
agagacagggtttctccaagtt

SEQ ID NO: 17550 - RNA, 22 nt, synthetic construct
  source 1..22: mol_type = other RNA
gagacagggtttctccaagttg

SEQ ID NO: 17551 - RNA, 22 nt, synthetic construct
  source 1..22: mol_type = other RNA
ctccaagttggccaggctggtc

SEQ ID NO: 17552 - RNA, 22 nt, synthetic construct
  source 1..22: mol_type = other RNA
tccaagttggccaggctggtct

SEQ ID NO: 17553 - RNA, 22 nt, synthetic construct
  source 1..22: mol_type = other RNA
gccaggctggtcttgaactcct

SEQ ID NO: 17554 - RNA, 22 nt, synthetic construct
  source 1..22: mol_type = other RNA
gtattacgtgtgtgttgtttat

SEQ ID NO: 17555 - RNA, 22 nt, synthetic construct
  source 1..22: mol_type = other RNA
tattacgtgtgtgttgtttatt

SEQ ID NO: 17556 - RNA, 22 nt, synthetic construct
  source 1..22: mol_type = other RNA
cgtgtgtgttgtttattgtttg

SEQ ID NO: 17557 - RNA, 22 nt, synthetic construct
  source 1..22: mol_type = other RNA
tttattgtttgaccctcccact

SEQ ID NO: 17558 - RNA, 22 nt, synthetic construct
  source 1..22: mol_type = other RNA
attgtttgaccctcccactgga

SEQ ID NO: 17559 - RNA, 22 nt, synthetic construct
  source 1..22: mol_type = other RNA
ttgtttgaccctcccactggaa

SEQ ID NO: 17560 - RNA, 22 nt, synthetic construct
  source 1..22: mol_type = other RNA
tttgaccctcccactggaaaat

SEQ ID NO: 17561 - RNA, 22 nt, synthetic construct
  source 1..22: mol_type = other RNA
gaccctcccactggaaaataaa

SEQ ID NO: 17562 - RNA, 22 nt, synthetic construct
  source 1..22: mol_type = other RNA
accctcccactggaaaataaac

SEQ ID NO: 17563 - RNA, 22 nt, synthetic construct
  source 1..22: mol_type = other RNA
tgatcacaatatgtcccaaata

SEQ ID NO: 17564 - RNA, 22 nt, synthetic construct
  source 1..22: mol_type = other RNA
gatcacaatatgtcccaaatac

SEQ ID NO: 17565 - RNA, 22 nt, synthetic construct
  source 1..22: mol_type = other RNA
atcacaatatgtcccaaatacc

SEQ ID NO: 17566 - RNA, 22 nt, synthetic construct
  source 1..22: mol_type = other RNA
gttgaatgttcagtggatggat

SEQ ID NO: 17567 - RNA, 22 nt, synthetic construct
  source 1..22: mol_type = other RNA
ttgaatgttcagtggatggatg

SEQ ID NO: 17568 - RNA, 22 nt, synthetic construct
  source 1..22: mol_type = other RNA
aatgttcagtggatggatgcgt

SEQ ID NO: 17569 - RNA, 22 nt, synthetic construct
  source 1..22: mol_type = other RNA
agtggatggatgcgttgatgag

SEQ ID NO: 17570 - RNA, 22 nt, synthetic construct
  source 1..22: mol_type = other RNA
atgagtgggtagatggatgaat

SEQ ID NO: 17571 - RNA, 22 nt, synthetic construct
  source 1..22: mol_type = other RNA
atgtaatgccattattcctact

SEQ ID NO: 17572 - RNA, 22 nt, synthetic construct
  source 1..22: mol_type = other RNA
ttcctactttaccaatgagtaa

SEQ ID NO: 17573 - RNA, 22 nt, synthetic construct
  source 1..22: mol_type = other RNA
ctactttaccaatgagtaaact

SEQ ID NO: 17574 - RNA, 22 nt, synthetic construct
  source 1..22: mol_type = other RNA
ccaatgagtaaactgaggcaca

SEQ ID NO: 17575 - RNA, 22 nt, synthetic construct
  source 1..22: mol_type = other RNA
atgatttgcctctggtcatgac

SEQ ID NO: 17576 - RNA, 22 nt, synthetic construct
  source 1..22: mol_type = other RNA
gcctctggtcatgacctgagga

SEQ ID NO: 17577 - RNA, 22 nt, synthetic construct
  source 1..22: mol_type = other RNA
cctctggtcatgacctgaggag

SEQ ID NO: 17578 - RNA, 22 nt, synthetic construct
  source 1..22: mol_type = other RNA
cagtacttcctgcaaaaaaaaa

SEQ ID NO: 17579 - RNA, 22 nt, synthetic construct
  source 1..22: mol_type = other RNA
gcttcctcttctaaacaaccca

SEQ ID NO: 17580 - RNA, 22 nt, synthetic construct
  source 1..22: mol_type = other RNA
agaagtccccttcagatattgc

SEQ ID NO: 17581 - RNA, 22 nt, synthetic construct
  source 1..22: mol_type = other RNA
cagtgccttaggtgcaattgtg

SEQ ID NO: 17582 - RNA, 22 nt, synthetic construct
  source 1..22: mol_type = other RNA
tgcagaaagcccagttctggag

SEQ ID NO: 17583 - RNA, 22 nt, synthetic construct
  source 1..22: mol_type = other RNA
tggagatgggagcttaggggtt

SEQ ID NO: 17584 - RNA, 22 nt, synthetic construct
  source 1..22: mol_type = other RNA
cgctctgtgctacactgagcaa

SEQ ID NO: 17585 - RNA, 22 nt, synthetic construct
  source 1..22: mol_type = other RNA
gctctgtgctacactgagcaac

SEQ ID NO: 17586 - RNA, 22 nt, synthetic construct
  source 1..22: mol_type = other RNA
cagtgagtcccaagagtcaaag

SEQ ID NO: 17587 - RNA, 22 nt, synthetic construct
  source 1..22: mol_type = other RNA
aagcaaacatttaggcagtccc

SEQ ID NO: 17588 - RNA, 22 nt, synthetic construct
  source 1..22: mol_type = other RNA
aggcagtccctggtcaacagtg

SEQ ID NO: 17589 - RNA, 22 nt, synthetic construct
  source 1..22: mol_type = other RNA
ggcagtccctggtcaacagtgg

SEQ ID NO: 17590 - RNA, 22 nt, synthetic construct
  source 1..22: mol_type = other RNA
tgctccttacgtaccatgtgac

SEQ ID NO: 17591 - RNA, 22 nt, synthetic construct
  source 1..22: mol_type = other RNA
cttcatctctgaaatgggagca

SEQ ID NO: 17592 - RNA, 22 nt, synthetic construct
  source 1..22: mol_type = other RNA
ttcatctctgaaatgggagcaa

SEQ ID NO: 17593 - RNA, 22 nt, synthetic construct
  source 1..22: mol_type = other RNA
aatgagatggtaggtagaaacc

SEQ ID NO: 17594 - RNA, 22 nt, synthetic construct
  source 1..22: mol_type = other RNA
ggtcgcactgtataaatatcag

SEQ ID NO: 17595 - RNA, 22 nt, synthetic construct
  source 1..22: mol_type = other RNA
gaggcaccaagaaaaataatta

SEQ ID NO: 17596 - RNA, 22 nt, synthetic construct
  source 1..22: mol_type = other RNA
aggcaccaagaaaaataattac

SEQ ID NO: 17597 - RNA, 22 nt, synthetic construct
  source 1..22: mol_type = other RNA
ctgcagtctgggggccccagac

SEQ ID NO: 17598 - RNA, 22 nt, synthetic construct
  source 1..22: mol_type = other RNA
gagaaacaaatcaatgtggccc

SEQ ID NO: 17599 - RNA, 22 nt, synthetic construct
  source 1..22: mol_type = other RNA
agaaacaaatcaatgtggcccc

SEQ ID NO: 17600 - RNA, 22 nt, synthetic construct
  source 1..22: mol_type = other RNA
aactggcacatgggccatgtcc

SEQ ID NO: 17601 - RNA, 22 nt, synthetic construct
  source 1..22: mol_type = other RNA
caagaggtatgactttgagcac

SEQ ID NO: 17602 - RNA, 22 nt, synthetic construct
  source 1..22: mol_type = other RNA
agcacttcccgggcgccccgcc

SEQ ID NO: 17603 - RNA, 22 nt, synthetic construct
  source 1..22: mol_type = other RNA
ccccatctataaagtggagatg

SEQ ID NO: 17604 - RNA, 22 nt, synthetic construct
  source 1..22: mol_type = other RNA
cccatctataaagtggagatga

SEQ ID NO: 17605 - RNA, 22 nt, synthetic construct
  source 1..22: mol_type = other RNA
agagtcactgatctaagggctc

SEQ ID NO: 17606 - RNA, 22 nt, synthetic construct
  source 1..22: mol_type = other RNA
agtgtaagccccatacactccc

SEQ ID NO: 17607 - RNA, 22 nt, synthetic construct
  source 1..22: mol_type = other RNA
tgactcagccttgaggctggcg

SEQ ID NO: 17608 - RNA, 22 nt, synthetic construct
  source 1..22: mol_type = other RNA
gaccatggaatgcgaggcacaa

SEQ ID NO: 17609 - RNA, 22 nt, synthetic construct
  source 1..22: mol_type = other RNA
accatggaatgcgaggcacaaa

SEQ ID NO: 17610 - RNA, 22 nt, synthetic construct
  source 1..22: mol_type = other RNA
tgcatactttctcagaggctgt

SEQ ID NO: 17611 - RNA, 22 nt, synthetic construct
  source 1..22: mol_type = other RNA
gcatactttctcagaggctgta

SEQ ID NO: 17612 - RNA, 22 nt, synthetic construct
  source 1..22: mol_type = other RNA
catactttctcagaggctgtag

SEQ ID NO: 17613 - RNA, 22 nt, synthetic construct
  source 1..22: mol_type = other RNA
tcagaggctgtagggcacccct

SEQ ID NO: 17614 - RNA, 22 nt, synthetic construct
  source 1..22: mol_type = other RNA
tattgattcctctgactctact

SEQ ID NO: 17615 - RNA, 22 nt, synthetic construct
  source 1..22: mol_type = other RNA
attgattcctctgactctactt

SEQ ID NO: 17616 - RNA, 22 nt, synthetic construct
  source 1..22: mol_type = other RNA
ttgattcctctgactctacttt

SEQ ID NO: 17617 - RNA, 22 nt, synthetic construct
  source 1..22: mol_type = other RNA
attcctctgactctactttgtt

SEQ ID NO: 17618 - RNA, 22 nt, synthetic construct
  source 1..22: mol_type = other RNA
ctctgactctactttgttggtt

SEQ ID NO: 17619 - RNA, 22 nt, synthetic construct
  source 1..22: mol_type = other RNA
ttggttgtttttgttgttctga

SEQ ID NO: 17620 - RNA, 22 nt, synthetic construct
  source 1..22: mol_type = other RNA
gttgtttttgttgttctgattt

SEQ ID NO: 17621 - RNA, 22 nt, synthetic construct
  source 1..22: mol_type = other RNA
tttttgttgttctgatttcatt

SEQ ID NO: 17622 - RNA, 22 nt, synthetic construct
  source 1..22: mol_type = other RNA
ttgttgttctgatttcattgcg

SEQ ID NO: 17623 - RNA, 22 nt, synthetic construct
  source 1..22: mol_type = other RNA
tgttgttctgatttcattgcgt

SEQ ID NO: 17624 - RNA, 22 nt, synthetic construct
  source 1..22: mol_type = other RNA
gttgttctgatttcattgcgtg

SEQ ID NO: 17625 - RNA, 22 nt, synthetic construct
  source 1..22: mol_type = other RNA
ttgttctgatttcattgcgtga

SEQ ID NO: 17626 - RNA, 22 nt, synthetic construct
  source 1..22: mol_type = other RNA
ttctgatttcattgcgtgacat

SEQ ID NO: 17627 - RNA, 22 nt, synthetic construct
  source 1..22: mol_type = other RNA
tgatttcattgcgtgacatttt

SEQ ID NO: 17628 - RNA, 22 nt, synthetic construct
  source 1..22: mol_type = other RNA
cattgcgtgacatttttgccca

SEQ ID NO: 17629 - RNA, 22 nt, synthetic construct
  source 1..22: mol_type = other RNA
attgcgtgacatttttgcccat

SEQ ID NO: 17630 - RNA, 22 nt, synthetic construct
  source 1..22: mol_type = other RNA
cgtgacatttttgcccatgagg

SEQ ID NO: 17631 - RNA, 22 nt, synthetic construct
  source 1..22: mol_type = other RNA
ttgcccatgaggtctcagttct

SEQ ID NO: 17632 - RNA, 22 nt, synthetic construct
  source 1..22: mol_type = other RNA
tgcccatgaggtctcagttcta

SEQ ID NO: 17633 - RNA, 22 nt, synthetic construct
  source 1..22: mol_type = other RNA
gcccatgaggtctcagttctag

SEQ ID NO: 17634 - RNA, 22 nt, synthetic construct
  source 1..22: mol_type = other RNA
cccatgaggtctcagttctagg

SEQ ID NO: 17635 - RNA, 22 nt, synthetic construct
  source 1..22: mol_type = other RNA
taggaatgacagaacaaaggct

SEQ ID NO: 17636 - RNA, 22 nt, synthetic construct
  source 1..22: mol_type = other RNA
attggaaagggaggaacacccc

SEQ ID NO: 17637 - RNA, 22 nt, synthetic construct
  source 1..22: mol_type = other RNA
ttggaaagggaggaacacccca

SEQ ID NO: 17638 - RNA, 22 nt, synthetic construct
  source 1..22: mol_type = other RNA
gaaagggaggaacaccccaccc

SEQ ID NO: 17639 - RNA, 22 nt, synthetic construct
  source 1..22: mol_type = other RNA
ctgagaaccagcccctgttctg

SEQ ID NO: 17640 - RNA, 22 nt, synthetic construct
  source 1..22: mol_type = other RNA
tgattttgggagtctcctttgc

SEQ ID NO: 17641 - RNA, 22 nt, synthetic construct
  source 1..22: mol_type = other RNA
tgggagtctcctttgcctcagg

SEQ ID NO: 17642 - RNA, 22 nt, synthetic construct
  source 1..22: mol_type = other RNA
gggagtctcctttgcctcaggg

SEQ ID NO: 17643 - RNA, 22 nt, synthetic construct
  source 1..22: mol_type = other RNA
ggagtctcctttgcctcaggga

SEQ ID NO: 17644 - RNA, 22 nt, synthetic construct
  source 1..22: mol_type = other RNA
cctcagggagggggatgtgttg

SEQ ID NO: 17645 - RNA, 22 nt, synthetic construct
  source 1..22: mol_type = other RNA
gcgaggaagactcgtgcctttc

SEQ ID NO: 17646 - RNA, 22 nt, synthetic construct
  source 1..22: mol_type = other RNA
atcttggactgcttctctggcc

SEQ ID NO: 17647 - RNA, 22 nt, synthetic construct
  source 1..22: mol_type = other RNA
ccccatgggttttcccaggcca

SEQ ID NO: 17648 - RNA, 22 nt, synthetic construct
  source 1..22: mol_type = other RNA
cccatgggttttcccaggccag

SEQ ID NO: 17649 - RNA, 22 nt, synthetic construct
  source 1..22: mol_type = other RNA
tcccaggccagcctgttccaaa

SEQ ID NO: 17650 - RNA, 22 nt, synthetic construct
  source 1..22: mol_type = other RNA
cccaggccagcctgttccaaac

SEQ ID NO: 17651 - RNA, 22 nt, synthetic construct
  source 1..22: mol_type = other RNA
ccaggccagcctgttccaaaca

SEQ ID NO: 17652 - RNA, 22 nt, synthetic construct
  source 1..22: mol_type = other RNA
caaacacagcttgcccccaagc

SEQ ID NO: 17653 - RNA, 22 nt, synthetic construct
  source 1..22: mol_type = other RNA
ctgttctctgttgctatgacct

SEQ ID NO: 17654 - RNA, 22 nt, synthetic construct
  source 1..22: mol_type = other RNA
tgttctctgttgctatgacctt

SEQ ID NO: 17655 - RNA, 22 nt, synthetic construct
  source 1..22: mol_type = other RNA
tctgttgctatgaccttgagca

SEQ ID NO: 17656 - RNA, 22 nt, synthetic construct
  source 1..22: mol_type = other RNA
ctatgaccttgagcagttcacc

SEQ ID NO: 17657 - RNA, 22 nt, synthetic construct
  source 1..22: mol_type = other RNA
acctgcgttccttactgtctac

SEQ ID NO: 17658 - RNA, 22 nt, synthetic construct
  source 1..22: mol_type = other RNA
cttactgtctactttcccatcc

SEQ ID NO: 17659 - RNA, 22 nt, synthetic construct
  source 1..22: mol_type = other RNA
ccatccacctacctgcctgccc

SEQ ID NO: 17660 - RNA, 22 nt, synthetic construct
  source 1..22: mol_type = other RNA
ctgatctgtgtacctaccttcc

SEQ ID NO: 17661 - RNA, 22 nt, synthetic construct
  source 1..22: mol_type = other RNA
tattattattatcattattctc

SEQ ID NO: 17662 - RNA, 22 nt, synthetic construct
  source 1..22: mol_type = other RNA
attattattatcattattctca

SEQ ID NO: 17663 - RNA, 22 nt, synthetic construct
  source 1..22: mol_type = other RNA
ttattattatcattattctcac

SEQ ID NO: 17664 - RNA, 22 nt, synthetic construct
  source 1..22: mol_type = other RNA
ttattatcattattctcaccct

SEQ ID NO: 17665 - RNA, 22 nt, synthetic construct
  source 1..22: mol_type = other RNA
ttatcattattctcaccctgtc

SEQ ID NO: 17666 - RNA, 22 nt, synthetic construct
  source 1..22: mol_type = other RNA
tcattattctcaccctgtcttt

SEQ ID NO: 17667 - RNA, 22 nt, synthetic construct
  source 1..22: mol_type = other RNA
ttctcaccctgtctttttttta

SEQ ID NO: 17668 - RNA, 22 nt, synthetic construct
  source 1..22: mol_type = other RNA
tcaccctgtcttttttttaatt

SEQ ID NO: 17669 - RNA, 22 nt, synthetic construct
  source 1..22: mol_type = other RNA
ttttaattttttttgggtgggg

SEQ ID NO: 17670 - RNA, 22 nt, synthetic construct
  source 1..22: mol_type = other RNA
tttaattttttttgggtggggg

SEQ ID NO: 17671 - RNA, 22 nt, synthetic construct
  source 1..22: mol_type = other RNA
ttaattttttttgggtgggggg

SEQ ID NO: 17672 - RNA, 22 nt, synthetic construct
  source 1..22: mol_type = other RNA
taattttttttgggtggggggg

SEQ ID NO: 17673 - RNA, 22 nt, synthetic construct
  source 1..22: mol_type = other RNA
aattttttttgggtggggggga

SEQ ID NO: 17674 - RNA, 22 nt, synthetic construct
  source 1..22: mol_type = other RNA
attttttttgggtgggggggac

SEQ ID NO: 17675 - RNA, 22 nt, synthetic construct
  source 1..22: mol_type = other RNA
tttttgggtgggggggacacag

SEQ ID NO: 17676 - RNA, 22 nt, synthetic construct
  source 1..22: mol_type = other RNA
ttttgggtgggggggacacagt

SEQ ID NO: 17677 - RNA, 22 nt, synthetic construct
  source 1..22: mol_type = other RNA
tttgggtgggggggacacagtc

SEQ ID NO: 17678 - RNA, 22 nt, synthetic construct
  source 1..22: mol_type = other RNA
ttgggtgggggggacacagtct

SEQ ID NO: 17679 - RNA, 22 nt, synthetic construct
  source 1..22: mol_type = other RNA
tgggtgggggggacacagtctt

SEQ ID NO: 17680 - RNA, 22 nt, synthetic construct
  source 1..22: mol_type = other RNA
gggtgggggggacacagtcttg

SEQ ID NO: 17681 - RNA, 22 nt, synthetic construct
  source 1..22: mol_type = other RNA
ggtgggggggacacagtcttgc

SEQ ID NO: 17682 - RNA, 22 nt, synthetic construct
  source 1..22: mol_type = other RNA
tagcccaggctggaatgcagtg

SEQ ID NO: 17683 - RNA, 22 nt, synthetic construct
  source 1..22: mol_type = other RNA
taacctctgcctcccagattca

SEQ ID NO: 17684 - RNA, 22 nt, synthetic construct
  source 1..22: mol_type = other RNA
aagcaattctcctgcctcagcc

SEQ ID NO: 17685 - RNA, 22 nt, synthetic construct
  source 1..22: mol_type = other RNA
tcctgcctcagcctcccgagta

SEQ ID NO: 17686 - RNA, 22 nt, synthetic construct
  source 1..22: mol_type = other RNA
caggcgcctgccaccatgccga

SEQ ID NO: 17687 - RNA, 22 nt, synthetic construct
  source 1..22: mol_type = other RNA
ttatatttttagtagagacagg

SEQ ID NO: 17688 - RNA, 22 nt, synthetic construct
  source 1..22: mol_type = other RNA
tatatttttagtagagacaggg

SEQ ID NO: 17689 - RNA, 22 nt, synthetic construct
  source 1..22: mol_type = other RNA
atatttttagtagagacagggt

SEQ ID NO: 17690 - RNA, 22 nt, synthetic construct
  source 1..22: mol_type = other RNA
tatttttagtagagacagggtt

SEQ ID NO: 17691 - RNA, 22 nt, synthetic construct
  source 1..22: mol_type = other RNA
ttagtagagacagggtttcatc

SEQ ID NO: 17692 - RNA, 22 nt, synthetic construct
  source 1..22: mol_type = other RNA
tagtagagacagggtttcatca

SEQ ID NO: 17693 - RNA, 22 nt, synthetic construct
  source 1..22: mol_type = other RNA
agtagagacagggtttcatcat

SEQ ID NO: 17694 - RNA, 22 nt, synthetic construct
  source 1..22: mol_type = other RNA
gtagagacagggtttcatcatg

SEQ ID NO: 17695 - RNA, 22 nt, synthetic construct
  source 1..22: mol_type = other RNA
catcatgttggccaggctggtc

SEQ ID NO: 17696 - RNA, 22 nt, synthetic construct
  source 1..22: mol_type = other RNA
atcatgttggccaggctggtct

SEQ ID NO: 17697 - RNA, 22 nt, synthetic construct
  source 1..22: mol_type = other RNA
gccaggctggtctcaaactcct

SEQ ID NO: 17698 - RNA, 22 nt, synthetic construct
  source 1..22: mol_type = other RNA
taggcgtgagccactgtgccca

SEQ ID NO: 17699 - RNA, 22 nt, synthetic construct
  source 1..22: mol_type = other RNA
atctatttatatctactgtcta

SEQ ID NO: 17700 - RNA, 22 nt, synthetic construct
  source 1..22: mol_type = other RNA
tctatttatatctactgtctac

SEQ ID NO: 17701 - RNA, 22 nt, synthetic construct
  source 1..22: mol_type = other RNA
atatctactgtctacatactta

SEQ ID NO: 17702 - RNA, 22 nt, synthetic construct
  source 1..22: mol_type = other RNA
tatctactgtctacatacttat

SEQ ID NO: 17703 - RNA, 22 nt, synthetic construct
  source 1..22: mol_type = other RNA
actcatgtctacttatcagtta

SEQ ID NO: 17704 - RNA, 22 nt, synthetic construct
  source 1..22: mol_type = other RNA
ctcatgtctacttatcagttaa

SEQ ID NO: 17705 - RNA, 22 nt, synthetic construct
  source 1..22: mol_type = other RNA
atccatttctctacctacctaa

SEQ ID NO: 17706 - RNA, 22 nt, synthetic construct
  source 1..22: mol_type = other RNA
ctctacctacctaatcacccat

SEQ ID NO: 17707 - RNA, 22 nt, synthetic construct
  source 1..22: mol_type = other RNA
tctacctacctaatcacccata

SEQ ID NO: 17708 - RNA, 22 nt, synthetic construct
  source 1..22: mol_type = other RNA
cccatgtatttacatgtcaaag

SEQ ID NO: 17709 - RNA, 22 nt, synthetic construct
  source 1..22: mol_type = other RNA
ccatgtatttacatgtcaaagt

SEQ ID NO: 17710 - RNA, 22 nt, synthetic construct
  source 1..22: mol_type = other RNA
acatgtcaaagtatttccctgc

SEQ ID NO: 17711 - RNA, 22 nt, synthetic construct
  source 1..22: mol_type = other RNA
catgtcaaagtatttccctgca

SEQ ID NO: 17712 - RNA, 22 nt, synthetic construct
  source 1..22: mol_type = other RNA
ccctgcattcctaccagctaag

SEQ ID NO: 17713 - RNA, 22 nt, synthetic construct
  source 1..22: mol_type = other RNA
cctgcattcctaccagctaagc

SEQ ID NO: 17714 - RNA, 22 nt, synthetic construct
  source 1..22: mol_type = other RNA
ctaccagctaagccccctttac

SEQ ID NO: 17715 - RNA, 22 nt, synthetic construct
  source 1..22: mol_type = other RNA
caacaatccatcagcaggtcca

SEQ ID NO: 17716 - RNA, 22 nt, synthetic construct
  source 1..22: mol_type = other RNA
tcatacaccctcccatgtccct

SEQ ID NO: 17717 - RNA, 22 nt, synthetic construct
  source 1..22: mol_type = other RNA
ggatacatagcagttgtattct

SEQ ID NO: 17718 - RNA, 22 nt, synthetic construct
  source 1..22: mol_type = other RNA
gatacatagcagttgtattcta

SEQ ID NO: 17719 - RNA, 22 nt, synthetic construct
  source 1..22: mol_type = other RNA
tattctactcacctatctccct

SEQ ID NO: 17720 - RNA, 22 nt, synthetic construct
  source 1..22: mol_type = other RNA
tactcacctatctccctattca

SEQ ID NO: 17721 - RNA, 22 nt, synthetic construct
  source 1..22: mol_type = other RNA
accgatctctttctctcccttt

SEQ ID NO: 17722 - RNA, 22 nt, synthetic construct
  source 1..22: mol_type = other RNA
tctccctttcttgcctcctttc

SEQ ID NO: 17723 - RNA, 22 nt, synthetic construct
  source 1..22: mol_type = other RNA
ttgcctcctttctttccttctc

SEQ ID NO: 17724 - RNA, 22 nt, synthetic construct
  source 1..22: mol_type = other RNA
tttccttctcctgaatcattta

SEQ ID NO: 17725 - RNA, 22 nt, synthetic construct
  source 1..22: mol_type = other RNA
cttctcctgaatcatttattta

SEQ ID NO: 17726 - RNA, 22 nt, synthetic construct
  source 1..22: mol_type = other RNA
atttagcacctgctagaaatta

SEQ ID NO: 17727 - RNA, 22 nt, synthetic construct
  source 1..22: mol_type = other RNA
tttagcacctgctagaaattat

SEQ ID NO: 17728 - RNA, 22 nt, synthetic construct
  source 1..22: mol_type = other RNA
agcacctgctagaaattatggt

SEQ ID NO: 17729 - RNA, 22 nt, synthetic construct
  source 1..22: mol_type = other RNA
gcacctgctagaaattatggtg

SEQ ID NO: 17730 - RNA, 22 nt, synthetic construct
  source 1..22: mol_type = other RNA
tggtggactccccatccagtgc

SEQ ID NO: 17731 - RNA, 22 nt, synthetic construct
  source 1..22: mol_type = other RNA
accaaaaagcatgagatgaaga

SEQ ID NO: 17732 - RNA, 22 nt, synthetic construct
  source 1..22: mol_type = other RNA
aacctagtaggggaggaatctt

SEQ ID NO: 17733 - RNA, 22 nt, synthetic construct
  source 1..22: mol_type = other RNA
acctagtaggggaggaatcttc

SEQ ID NO: 17734 - RNA, 22 nt, synthetic construct
  source 1..22: mol_type = other RNA
ggaactggaggctgccttgatc

SEQ ID NO: 17735 - RNA, 22 nt, synthetic construct
  source 1..22: mol_type = other RNA
gaactggaggctgccttgatca

SEQ ID NO: 17736 - RNA, 22 nt, synthetic construct
  source 1..22: mol_type = other RNA
aaatctaaaactccattcattc

SEQ ID NO: 17737 - RNA, 22 nt, synthetic construct
  source 1..22: mol_type = other RNA
attccttcaaatggtcttagaa

SEQ ID NO: 17738 - RNA, 22 nt, synthetic construct
  source 1..22: mol_type = other RNA
cttcaaatggtcttagaatagt

SEQ ID NO: 17739 - RNA, 22 nt, synthetic construct
  source 1..22: mol_type = other RNA
tattattttattttattttttg

SEQ ID NO: 17740 - RNA, 22 nt, synthetic construct
  source 1..22: mol_type = other RNA
attattttattttattttttga

SEQ ID NO: 17741 - RNA, 22 nt, synthetic construct
  source 1..22: mol_type = other RNA
ttattttattttattttttgag

SEQ ID NO: 17742 - RNA, 22 nt, synthetic construct
  source 1..22: mol_type = other RNA
ttttattttattttttgagaca

SEQ ID NO: 17743 - RNA, 22 nt, synthetic construct
  source 1..22: mol_type = other RNA
tattttattttttgagacaggg

SEQ ID NO: 17744 - RNA, 22 nt, synthetic construct
  source 1..22: mol_type = other RNA
attttattttttgagacagggt

SEQ ID NO: 17745 - RNA, 22 nt, synthetic construct
  source 1..22: mol_type = other RNA
ttttattttttgagacagggtc

SEQ ID NO: 17746 - RNA, 22 nt, synthetic construct
  source 1..22: mol_type = other RNA
tattttttgagacagggtcttg

SEQ ID NO: 17747 - RNA, 22 nt, synthetic construct
  source 1..22: mol_type = other RNA
attttttgagacagggtcttgc

SEQ ID NO: 17748 - RNA, 22 nt, synthetic construct
  source 1..22: mol_type = other RNA
ttttttgagacagggtcttgct

SEQ ID NO: 17749 - RNA, 22 nt, synthetic construct
  source 1..22: mol_type = other RNA
tttgagacagggtcttgctctg

SEQ ID NO: 17750 - RNA, 22 nt, synthetic construct
  source 1..22: mol_type = other RNA
ttgagacagggtcttgctctgt

SEQ ID NO: 17751 - RNA, 22 nt, synthetic construct
  source 1..22: mol_type = other RNA
tgagacagggtcttgctctgtc

SEQ ID NO: 17752 - RNA, 22 nt, synthetic construct
  source 1..22: mol_type = other RNA
gagacagggtcttgctctgtcg

SEQ ID NO: 17753 - RNA, 22 nt, synthetic construct
  source 1..22: mol_type = other RNA
agacagggtcttgctctgtcgc

SEQ ID NO: 17754 - RNA, 22 nt, synthetic construct
  source 1..22: mol_type = other RNA
ttttatttgtggtagagatgag

SEQ ID NO: 17755 - RNA, 22 nt, synthetic construct
  source 1..22: mol_type = other RNA
tttatttgtggtagagatgagg

SEQ ID NO: 17756 - RNA, 22 nt, synthetic construct
  source 1..22: mol_type = other RNA
ttatttgtggtagagatgaggt

SEQ ID NO: 17757 - RNA, 22 nt, synthetic construct
  source 1..22: mol_type = other RNA
tatttgtggtagagatgaggtc

SEQ ID NO: 17758 - RNA, 22 nt, synthetic construct
  source 1..22: mol_type = other RNA
atttgtggtagagatgaggtct

SEQ ID NO: 17759 - RNA, 22 nt, synthetic construct
  source 1..22: mol_type = other RNA
tttgtggtagagatgaggtctc

SEQ ID NO: 17760 - RNA, 22 nt, synthetic construct
  source 1..22: mol_type = other RNA
gtggtagagatgaggtctcgct

SEQ ID NO: 17761 - RNA, 22 nt, synthetic construct
  source 1..22: mol_type = other RNA
tggtagagatgaggtctcgcta

SEQ ID NO: 17762 - RNA, 22 nt, synthetic construct
  source 1..22: mol_type = other RNA
cccacggctggtctcaaacttc

SEQ ID NO: 17763 - RNA, 22 nt, synthetic construct
  source 1..22: mol_type = other RNA
ccacggctggtctcaaacttct

SEQ ID NO: 17764 - RNA, 22 nt, synthetic construct
  source 1..22: mol_type = other RNA
aaatgctcagtcttgtgtaggt

SEQ ID NO: 17765 - RNA, 22 nt, synthetic construct
  source 1..22: mol_type = other RNA
gggtaagtgcagaaaattaaag

SEQ ID NO: 17766 - RNA, 22 nt, synthetic construct
  source 1..22: mol_type = other RNA
aagacctgatcctagacattaa

SEQ ID NO: 17767 - RNA, 22 nt, synthetic construct
  source 1..22: mol_type = other RNA
acagatgtatgatctaatcaga

SEQ ID NO: 17768 - RNA, 22 nt, synthetic construct
  source 1..22: mol_type = other RNA
aagttgtattgccaaataatgt

SEQ ID NO: 17769 - RNA, 22 nt, synthetic construct
  source 1..22: mol_type = other RNA
tattgccaaataatgttgcagc

SEQ ID NO: 17770 - RNA, 22 nt, synthetic construct
  source 1..22: mol_type = other RNA
ccaaataatgttgcagcaagtt

SEQ ID NO: 17771 - RNA, 22 nt, synthetic construct
  source 1..22: mol_type = other RNA
cagcaagttttgtaaaacacag

SEQ ID NO: 17772 - RNA, 22 nt, synthetic construct
  source 1..22: mol_type = other RNA
tgtaaaacacagcaaagcaaga

SEQ ID NO: 17773 - RNA, 22 nt, synthetic construct
  source 1..22: mol_type = other RNA
gtaaaacacagcaaagcaagaa

SEQ ID NO: 17774 - RNA, 22 nt, synthetic construct
  source 1..22: mol_type = other RNA
taaaacacagcaaagcaagaaa

SEQ ID NO: 17775 - RNA, 22 nt, synthetic construct
  source 1..22: mol_type = other RNA
tagttagctggaagcgcgatga

SEQ ID NO: 17776 - RNA, 22 nt, synthetic construct
  source 1..22: mol_type = other RNA
gctggaagcgcgatgaaggtgg

SEQ ID NO: 17777 - RNA, 22 nt, synthetic construct
  source 1..22: mol_type = other RNA
caggatggctaaaatatagacc

SEQ ID NO: 17778 - RNA, 22 nt, synthetic construct
  source 1..22: mol_type = other RNA
ttccttggcttgcagggaacca

SEQ ID NO: 17779 - RNA, 22 nt, synthetic construct
  source 1..22: mol_type = other RNA
tgggagactgcagcaaggaccg

SEQ ID NO: 17780 - RNA, 22 nt, synthetic construct
  source 1..22: mol_type = other RNA
gggagactgcagcaaggaccgg

SEQ ID NO: 17781 - RNA, 22 nt, synthetic construct
  source 1..22: mol_type = other RNA
ggagactgcagcaaggaccggc

SEQ ID NO: 17782 - RNA, 22 nt, synthetic construct
  source 1..22: mol_type = other RNA
ttccagaacaactgttctttac

SEQ ID NO: 17783 - RNA, 22 nt, synthetic construct
  source 1..22: mol_type = other RNA
tccagaacaactgttctttact

SEQ ID NO: 17784 - RNA, 22 nt, synthetic construct
  source 1..22: mol_type = other RNA
ccagaacaactgttctttactt

SEQ ID NO: 17785 - RNA, 22 nt, synthetic construct
  source 1..22: mol_type = other RNA
cagaacaactgttctttacttg

SEQ ID NO: 17786 - RNA, 22 nt, synthetic construct
  source 1..22: mol_type = other RNA
tttacttggaagacctagttac

SEQ ID NO: 17787 - RNA, 22 nt, synthetic construct
  source 1..22: mol_type = other RNA
cttggaagacctagttactccc

SEQ ID NO: 17788 - RNA, 22 nt, synthetic construct
  source 1..22: mol_type = other RNA
ctccccatctctccctgggact

SEQ ID NO: 17789 - RNA, 22 nt, synthetic construct
  source 1..22: mol_type = other RNA
tgctgggtgctagtggttgctg

SEQ ID NO: 17790 - RNA, 22 nt, synthetic construct
  source 1..22: mol_type = other RNA
ctggcatgctagtttctgactc

SEQ ID NO: 17791 - RNA, 22 nt, synthetic construct
  source 1..22: mol_type = other RNA
ctgactcgagacaaataaattc

SEQ ID NO: 17792 - RNA, 22 nt, synthetic construct
  source 1..22: mol_type = other RNA
tgactcgagacaaataaattca

SEQ ID NO: 17793 - RNA, 22 nt, synthetic construct
  source 1..22: mol_type = other RNA
agatccctagggtaagaccggc

SEQ ID NO: 17794 - RNA, 22 nt, synthetic construct
  source 1..22: mol_type = other RNA
tcccaagcagacctgggctcgg

SEQ ID NO: 17795 - RNA, 22 nt, synthetic construct
  source 1..22: mol_type = other RNA
tttgttgttgctgttgttgtgt

SEQ ID NO: 17796 - RNA, 22 nt, synthetic construct
  source 1..22: mol_type = other RNA
ttgttgttgctgttgttgtgtt

SEQ ID NO: 17797 - RNA, 22 nt, synthetic construct
  source 1..22: mol_type = other RNA
tgttgttgctgttgttgtgttt

SEQ ID NO: 17798 - RNA, 22 nt, synthetic construct
  source 1..22: mol_type = other RNA
gttgttgctgttgttgtgtttt

SEQ ID NO: 17799 - RNA, 22 nt, synthetic construct
  source 1..22: mol_type = other RNA
ttgttgctgttgttgtgttttg

SEQ ID NO: 17800 - RNA, 22 nt, synthetic construct
  source 1..22: mol_type = other RNA
ttgctgttgttgtgttttgttg

SEQ ID NO: 17801 - RNA, 22 nt, synthetic construct
  source 1..22: mol_type = other RNA
ctgttgttgtgttttgttgtgt

SEQ ID NO: 17802 - RNA, 22 nt, synthetic construct
  source 1..22: mol_type = other RNA
ttgtgttttgttgtgttttgtt

SEQ ID NO: 17803 - RNA, 22 nt, synthetic construct
  source 1..22: mol_type = other RNA
tgttttgttgtgttttgttttt

SEQ ID NO: 17804 - RNA, 22 nt, synthetic construct
  source 1..22: mol_type = other RNA
tgttgtgttttgtttttgtttt

SEQ ID NO: 17805 - RNA, 22 nt, synthetic construct
  source 1..22: mol_type = other RNA
gttgtgttttgtttttgttttt

SEQ ID NO: 17806 - RNA, 22 nt, synthetic construct
  source 1..22: mol_type = other RNA
ttgtgttttgtttttgtttttg

SEQ ID NO: 17807 - RNA, 22 nt, synthetic construct
  source 1..22: mol_type = other RNA
tgttttgtttttgtttttgatt

SEQ ID NO: 17808 - RNA, 22 nt, synthetic construct
  source 1..22: mol_type = other RNA
tgtttttgtttttgattttttg

SEQ ID NO: 17809 - RNA, 22 nt, synthetic construct
  source 1..22: mol_type = other RNA
gtttttgtttttgattttttga

SEQ ID NO: 17810 - RNA, 22 nt, synthetic construct
  source 1..22: mol_type = other RNA
tttttgtttttgattttttgaa

SEQ ID NO: 17811 - RNA, 22 nt, synthetic construct
  source 1..22: mol_type = other RNA
ttgtttttgattttttgaaata

SEQ ID NO: 17812 - RNA, 22 nt, synthetic construct
  source 1..22: mol_type = other RNA
tgtttttgattttttgaaatag

SEQ ID NO: 17813 - RNA, 22 nt, synthetic construct
  source 1..22: mol_type = other RNA
gtttttgattttttgaaataga

SEQ ID NO: 17814 - RNA, 22 nt, synthetic construct
  source 1..22: mol_type = other RNA
tttttgattttttgaaatagag

SEQ ID NO: 17815 - RNA, 22 nt, synthetic construct
  source 1..22: mol_type = other RNA
ttgattttttgaaatagagtct

SEQ ID NO: 17816 - RNA, 22 nt, synthetic construct
  source 1..22: mol_type = other RNA
tgattttttgaaatagagtctc

SEQ ID NO: 17817 - RNA, 22 nt, synthetic construct
  source 1..22: mol_type = other RNA
gattttttgaaatagagtctcg

SEQ ID NO: 17818 - RNA, 22 nt, synthetic construct
  source 1..22: mol_type = other RNA
attttttgaaatagagtctcgc

SEQ ID NO: 17819 - RNA, 22 nt, synthetic construct
  source 1..22: mol_type = other RNA
tttgaaatagagtctcgctctg

SEQ ID NO: 17820 - RNA, 22 nt, synthetic construct
  source 1..22: mol_type = other RNA
ttgaaatagagtctcgctctga

SEQ ID NO: 17821 - RNA, 22 nt, synthetic construct
  source 1..22: mol_type = other RNA
tgaaatagagtctcgctctgaa

SEQ ID NO: 17822 - RNA, 22 nt, synthetic construct
  source 1..22: mol_type = other RNA
gaaatagagtctcgctctgaag

SEQ ID NO: 17823 - RNA, 22 nt, synthetic construct
  source 1..22: mol_type = other RNA
aaatagagtctcgctctgaagc

SEQ ID NO: 17824 - RNA, 22 nt, synthetic construct
  source 1..22: mol_type = other RNA
aagcaattctcctgcctcagcc

SEQ ID NO: 17825 - RNA, 22 nt, synthetic construct
  source 1..22: mol_type = other RNA
tcctgcctcagcctcccaagta

SEQ ID NO: 17826 - RNA, 22 nt, synthetic construct
  source 1..22: mol_type = other RNA
caggcgtgcaccaccacacctg

SEQ ID NO: 17827 - RNA, 22 nt, synthetic construct
  source 1..22: mol_type = other RNA
ttctatttttagtagagacagg

SEQ ID NO: 17828 - RNA, 22 nt, synthetic construct
  source 1..22: mol_type = other RNA
tctatttttagtagagacaggg

SEQ ID NO: 17829 - RNA, 22 nt, synthetic construct
  source 1..22: mol_type = other RNA
ctatttttagtagagacagggt

SEQ ID NO: 17830 - RNA, 22 nt, synthetic construct
  source 1..22: mol_type = other RNA
tatttttagtagagacagggtt

SEQ ID NO: 17831 - RNA, 22 nt, synthetic construct
  source 1..22: mol_type = other RNA
ttagtagagacagggtttcacc

SEQ ID NO: 17832 - RNA, 22 nt, synthetic construct
  source 1..22: mol_type = other RNA
tagtagagacagggtttcacca

SEQ ID NO: 17833 - RNA, 22 nt, synthetic construct
  source 1..22: mol_type = other RNA
agtagagacagggtttcaccat

SEQ ID NO: 17834 - RNA, 22 nt, synthetic construct
  source 1..22: mol_type = other RNA
gtagagacagggtttcaccatg

SEQ ID NO: 17835 - RNA, 22 nt, synthetic construct
  source 1..22: mol_type = other RNA
caccatgttggccaggctggtt

SEQ ID NO: 17836 - RNA, 22 nt, synthetic construct
  source 1..22: mol_type = other RNA
accatgttggccaggctggttt

SEQ ID NO: 17837 - RNA, 22 nt, synthetic construct
  source 1..22: mol_type = other RNA
gccaggctggtttcgaattcct

SEQ ID NO: 17838 - RNA, 22 nt, synthetic construct
  source 1..22: mol_type = other RNA
cgaattcctgacctcaggtgat

SEQ ID NO: 17839 - RNA, 22 nt, synthetic construct
  source 1..22: mol_type = other RNA
gaattcctgacctcaggtgatc

SEQ ID NO: 17840 - RNA, 22 nt, synthetic construct
  source 1..22: mol_type = other RNA
ctgacctcaggtgatccgcccg

SEQ ID NO: 17841 - RNA, 22 nt, synthetic construct
  source 1..22: mol_type = other RNA
agattacaggcgtgagccacca

SEQ ID NO: 17842 - RNA, 22 nt, synthetic construct
  source 1..22: mol_type = other RNA
caggcgtgagccaccacgcccg

SEQ ID NO: 17843 - RNA, 22 nt, synthetic construct
  source 1..22: mol_type = other RNA
agaggcaggaacaaggatgcag

SEQ ID NO: 17844 - RNA, 22 nt, synthetic construct
  source 1..22: mol_type = other RNA
caacagagaggaagcctggggt

SEQ ID NO: 17845 - RNA, 22 nt, synthetic construct
  source 1..22: mol_type = other RNA
aacagagaggaagcctggggtg

SEQ ID NO: 17846 - RNA, 22 nt, synthetic construct
  source 1..22: mol_type = other RNA
ctcctcgtgctctttgccccca

SEQ ID NO: 17847 - RNA, 22 nt, synthetic construct
  source 1..22: mol_type = other RNA
cccccattcactcagtgctaga

SEQ ID NO: 17848 - RNA, 22 nt, synthetic construct
  source 1..22: mol_type = other RNA
actcagtgctagaggttgtcat

SEQ ID NO: 17849 - RNA, 22 nt, synthetic construct
  source 1..22: mol_type = other RNA
tcattctgcctctgagacatcc

SEQ ID NO: 17850 - RNA, 22 nt, synthetic construct
  source 1..22: mol_type = other RNA
tgcctctgagacatccggcccc

SEQ ID NO: 17851 - RNA, 22 nt, synthetic construct
  source 1..22: mol_type = other RNA
gacggatgtcacttgctctgct

SEQ ID NO: 17852 - RNA, 22 nt, synthetic construct
  source 1..22: mol_type = other RNA
acggatgtcacttgctctgctc

SEQ ID NO: 17853 - RNA, 22 nt, synthetic construct
  source 1..22: mol_type = other RNA
aggtcttgtggacaagaactgg

SEQ ID NO: 17854 - RNA, 22 nt, synthetic construct
  source 1..22: mol_type = other RNA
taagttccaaagctgccttggc

SEQ ID NO: 17855 - RNA, 22 nt, synthetic construct
  source 1..22: mol_type = other RNA
caaagctgccttggccatcggt

SEQ ID NO: 17856 - RNA, 22 nt, synthetic construct
  source 1..22: mol_type = other RNA
tttttttttcttttttttgaga

SEQ ID NO: 17857 - RNA, 22 nt, synthetic construct
  source 1..22: mol_type = other RNA
tttttcttttttttgagactga

SEQ ID NO: 17858 - RNA, 22 nt, synthetic construct
  source 1..22: mol_type = other RNA
ttttcttttttttgagactgag

SEQ ID NO: 17859 - RNA, 22 nt, synthetic construct
  source 1..22: mol_type = other RNA
tttcttttttttgagactgagt

SEQ ID NO: 17860 - RNA, 22 nt, synthetic construct
  source 1..22: mol_type = other RNA
ttcttttttttgagactgagtc

SEQ ID NO: 17861 - RNA, 22 nt, synthetic construct
  source 1..22: mol_type = other RNA
tcttttttttgagactgagtct

SEQ ID NO: 17862 - RNA, 22 nt, synthetic construct
  source 1..22: mol_type = other RNA
cttttttttgagactgagtctc

SEQ ID NO: 17863 - RNA, 22 nt, synthetic construct
  source 1..22: mol_type = other RNA
ttttttttgagactgagtctca

SEQ ID NO: 17864 - RNA, 22 nt, synthetic construct
  source 1..22: mol_type = other RNA
ttttgagactgagtctcactct

SEQ ID NO: 17865 - RNA, 22 nt, synthetic construct
  source 1..22: mol_type = other RNA
tttgagactgagtctcactctg

SEQ ID NO: 17866 - RNA, 22 nt, synthetic construct
  source 1..22: mol_type = other RNA
ttgagactgagtctcactctgt

SEQ ID NO: 17867 - RNA, 22 nt, synthetic construct
  source 1..22: mol_type = other RNA
tgagactgagtctcactctgtc

SEQ ID NO: 17868 - RNA, 22 nt, synthetic construct
  source 1..22: mol_type = other RNA
gagactgagtctcactctgtca

SEQ ID NO: 17869 - RNA, 22 nt, synthetic construct
  source 1..22: mol_type = other RNA
agactgagtctcactctgtcac

SEQ ID NO: 17870 - RNA, 22 nt, synthetic construct
  source 1..22: mol_type = other RNA
atgtgattctcatccctcagtc

SEQ ID NO: 17871 - RNA, 22 nt, synthetic construct
  source 1..22: mol_type = other RNA
tcatccctcagtctcccgagta

SEQ ID NO: 17872 - RNA, 22 nt, synthetic construct
  source 1..22: mol_type = other RNA
ttgtatttttagtagagaaagg

SEQ ID NO: 17873 - RNA, 22 nt, synthetic construct
  source 1..22: mol_type = other RNA
tgtatttttagtagagaaagga

SEQ ID NO: 17874 - RNA, 22 nt, synthetic construct
  source 1..22: mol_type = other RNA
gtatttttagtagagaaaggat

SEQ ID NO: 17875 - RNA, 22 nt, synthetic construct
  source 1..22: mol_type = other RNA
tatttttagtagagaaaggatt

SEQ ID NO: 17876 - RNA, 22 nt, synthetic construct
  source 1..22: mol_type = other RNA
ttagtagagaaaggattttgcc

SEQ ID NO: 17877 - RNA, 22 nt, synthetic construct
  source 1..22: mol_type = other RNA
tagtagagaaaggattttgcca

SEQ ID NO: 17878 - RNA, 22 nt, synthetic construct
  source 1..22: mol_type = other RNA
agtagagaaaggattttgccac

SEQ ID NO: 17879 - RNA, 22 nt, synthetic construct
  source 1..22: mol_type = other RNA
gtagagaaaggattttgccacg

SEQ ID NO: 17880 - RNA, 22 nt, synthetic construct
  source 1..22: mol_type = other RNA
tgccacgttggccaggctggtc

SEQ ID NO: 17881 - RNA, 22 nt, synthetic construct
  source 1..22: mol_type = other RNA
gccacgttggccaggctggtct

SEQ ID NO: 17882 - RNA, 22 nt, synthetic construct
  source 1..22: mol_type = other RNA
ccacgttggccaggctggtctt

SEQ ID NO: 17883 - RNA, 22 nt, synthetic construct
  source 1..22: mol_type = other RNA
gccaggctggtcttcaactcct

SEQ ID NO: 17884 - RNA, 22 nt, synthetic construct
  source 1..22: mol_type = other RNA
caggcatgagccactgtgcctg

SEQ ID NO: 17885 - RNA, 22 nt, synthetic construct
  source 1..22: mol_type = other RNA
ttagaatttctgacattcacca

SEQ ID NO: 17886 - RNA, 22 nt, synthetic construct
  source 1..22: mol_type = other RNA
ctgacattcaccatatccgttt

SEQ ID NO: 17887 - RNA, 22 nt, synthetic construct
  source 1..22: mol_type = other RNA
tgacattcaccatatccgtttg

SEQ ID NO: 17888 - RNA, 22 nt, synthetic construct
  source 1..22: mol_type = other RNA
accatatccgtttgttagcccc

SEQ ID NO: 17889 - RNA, 22 nt, synthetic construct
  source 1..22: mol_type = other RNA
gttagccccactaagcaaggct

SEQ ID NO: 17890 - RNA, 22 nt, synthetic construct
  source 1..22: mol_type = other RNA
ttagccccactaagcaaggctg

SEQ ID NO: 17891 - RNA, 22 nt, synthetic construct
  source 1..22: mol_type = other RNA
gccccactaagcaaggctgttt

SEQ ID NO: 17892 - RNA, 22 nt, synthetic construct
  source 1..22: mol_type = other RNA
caaattgactcagcatttctta

SEQ ID NO: 17893 - RNA, 22 nt, synthetic construct
  source 1..22: mol_type = other RNA
aaattgactcagcatttcttat

SEQ ID NO: 17894 - RNA, 22 nt, synthetic construct
  source 1..22: mol_type = other RNA
actcagcatttcttatttgtca

SEQ ID NO: 17895 - RNA, 22 nt, synthetic construct
  source 1..22: mol_type = other RNA
cttatttgtcaatttctacccc

SEQ ID NO: 17896 - RNA, 22 nt, synthetic construct
  source 1..22: mol_type = other RNA
ttatttgtcaatttctacccca

SEQ ID NO: 17897 - RNA, 22 nt, synthetic construct
  source 1..22: mol_type = other RNA
gtcaatttctaccccactcctc

SEQ ID NO: 17898 - RNA, 22 nt, synthetic construct
  source 1..22: mol_type = other RNA
tcaatttctaccccactcctca

SEQ ID NO: 17899 - RNA, 22 nt, synthetic construct
  source 1..22: mol_type = other RNA
ctaccccactcctcacccgggg

SEQ ID NO: 17900 - RNA, 22 nt, synthetic construct
  source 1..22: mol_type = other RNA
taccccactcctcacccgggga

SEQ ID NO: 17901 - RNA, 22 nt, synthetic construct
  source 1..22: mol_type = other RNA
cacacatggggaaactgaggac

SEQ ID NO: 17902 - RNA, 22 nt, synthetic construct
  source 1..22: mol_type = other RNA
acacatggggaaactgaggacc

SEQ ID NO: 17903 - RNA, 22 nt, synthetic construct
  source 1..22: mol_type = other RNA
cccgtccagtgctctttcagca

SEQ ID NO: 17904 - RNA, 22 nt, synthetic construct
  source 1..22: mol_type = other RNA
agcaaaaatgcatgaggcacac

SEQ ID NO: 17905 - RNA, 22 nt, synthetic construct
  source 1..22: mol_type = other RNA
ccaaaccttcatttcagtacca

SEQ ID NO: 17906 - RNA, 22 nt, synthetic construct
  source 1..22: mol_type = other RNA
caaaccttcatttcagtaccac

SEQ ID NO: 17907 - RNA, 22 nt, synthetic construct
  source 1..22: mol_type = other RNA
cagtaccaccttcatcattttt

SEQ ID NO: 17908 - RNA, 22 nt, synthetic construct
  source 1..22: mol_type = other RNA
agtaccaccttcatcatttttg

SEQ ID NO: 17909 - RNA, 22 nt, synthetic construct
  source 1..22: mol_type = other RNA
ttgtgttttccacataacactt

SEQ ID NO: 17910 - RNA, 22 nt, synthetic construct
  source 1..22: mol_type = other RNA
tgtgttttccacataacacttt

SEQ ID NO: 17911 - RNA, 22 nt, synthetic construct
  source 1..22: mol_type = other RNA
gtgttttccacataacacttta

SEQ ID NO: 17912 - RNA, 22 nt, synthetic construct
  source 1..22: mol_type = other RNA
tgttttccacataacactttac

SEQ ID NO: 17913 - RNA, 22 nt, synthetic construct
  source 1..22: mol_type = other RNA
tccacataacactttactatta

SEQ ID NO: 17914 - RNA, 22 nt, synthetic construct
  source 1..22: mol_type = other RNA
ccacataacactttactattat

SEQ ID NO: 17915 - RNA, 22 nt, synthetic construct
  source 1..22: mol_type = other RNA
cacataacactttactattatt

SEQ ID NO: 17916 - RNA, 22 nt, synthetic construct
  source 1..22: mol_type = other RNA
ctattatttatgacagggtttt

SEQ ID NO: 17917 - RNA, 22 nt, synthetic construct
  source 1..22: mol_type = other RNA
tttatgacagggttttttttaa

SEQ ID NO: 17918 - RNA, 22 nt, synthetic construct
  source 1..22: mol_type = other RNA
atgacagggttttttttaacca

SEQ ID NO: 17919 - RNA, 22 nt, synthetic construct
  source 1..22: mol_type = other RNA
tgacagggttttttttaaccac

SEQ ID NO: 17920 - RNA, 22 nt, synthetic construct
  source 1..22: mol_type = other RNA
tttttaaccactcacctttttt

SEQ ID NO: 17921 - RNA, 22 nt, synthetic construct
  source 1..22: mol_type = other RNA
ttttaaccactcacctttttta

SEQ ID NO: 17922 - RNA, 22 nt, synthetic construct
  source 1..22: mol_type = other RNA
tttaaccactcaccttttttac

SEQ ID NO: 17923 - RNA, 22 nt, synthetic construct
  source 1..22: mol_type = other RNA
ttaaccactcaccttttttact

SEQ ID NO: 17924 - RNA, 22 nt, synthetic construct
  source 1..22: mol_type = other RNA
taaccactcaccttttttactt

SEQ ID NO: 17925 - RNA, 22 nt, synthetic construct
  source 1..22: mol_type = other RNA
aaccactcaccttttttactta

SEQ ID NO: 17926 - RNA, 22 nt, synthetic construct
  source 1..22: mol_type = other RNA
accactcaccttttttacttat

SEQ ID NO: 17927 - RNA, 22 nt, synthetic construct
  source 1..22: mol_type = other RNA
ttacttatctttcttttctttt

SEQ ID NO: 17928 - RNA, 22 nt, synthetic construct
  source 1..22: mol_type = other RNA
tacttatctttcttttcttttt

SEQ ID NO: 17929 - RNA, 22 nt, synthetic construct
  source 1..22: mol_type = other RNA
acttatctttcttttctttttc

SEQ ID NO: 17930 - RNA, 22 nt, synthetic construct
  source 1..22: mol_type = other RNA
cttatctttcttttctttttct

SEQ ID NO: 17931 - RNA, 22 nt, synthetic construct
  source 1..22: mol_type = other RNA
ttttctttttctttaggagagg

SEQ ID NO: 17932 - RNA, 22 nt, synthetic construct
  source 1..22: mol_type = other RNA
ctttttctttaggagaggcagg

SEQ ID NO: 17933 - RNA, 22 nt, synthetic construct
  source 1..22: mol_type = other RNA
tttttctttaggagaggcagga

SEQ ID NO: 17934 - RNA, 22 nt, synthetic construct
  source 1..22: mol_type = other RNA
tctttaggagaggcaggatctc

SEQ ID NO: 17935 - RNA, 22 nt, synthetic construct
  source 1..22: mol_type = other RNA
ctttaggagaggcaggatctca

SEQ ID NO: 17936 - RNA, 22 nt, synthetic construct
  source 1..22: mol_type = other RNA
tttaggagaggcaggatctcac

SEQ ID NO: 17937 - RNA, 22 nt, synthetic construct
  source 1..22: mol_type = other RNA
ggagaggcaggatctcactctg

SEQ ID NO: 17938 - RNA, 22 nt, synthetic construct
  source 1..22: mol_type = other RNA
cccaggctggagtgtatttcat

SEQ ID NO: 17939 - RNA, 22 nt, synthetic construct
  source 1..22: mol_type = other RNA
catgatcatagctcactgcagc

SEQ ID NO: 17940 - RNA, 22 nt, synthetic construct
  source 1..22: mol_type = other RNA
atgatcatagctcactgcagcc

SEQ ID NO: 17941 - RNA, 22 nt, synthetic construct
  source 1..22: mol_type = other RNA
ttaaaaaatcatttgtagaaaa

SEQ ID NO: 17942 - RNA, 22 nt, synthetic construct
  source 1..22: mol_type = other RNA
taaaaaatcatttgtagaaaaa

SEQ ID NO: 17943 - RNA, 22 nt, synthetic construct
  source 1..22: mol_type = other RNA
aaaaaatcatttgtagaaaaat

SEQ ID NO: 17944 - RNA, 22 nt, synthetic construct
  source 1..22: mol_type = other RNA
aaaaatcatttgtagaaaaatt

SEQ ID NO: 17945 - RNA, 22 nt, synthetic construct
  source 1..22: mol_type = other RNA
gtagaaaaattagctggatgta

SEQ ID NO: 17946 - RNA, 22 nt, synthetic construct
  source 1..22: mol_type = other RNA
tagaaaaattagctggatgtag

SEQ ID NO: 17947 - RNA, 22 nt, synthetic construct
  source 1..22: mol_type = other RNA
gctggatgtaggagaatggcgt

SEQ ID NO: 17948 - RNA, 22 nt, synthetic construct
  source 1..22: mol_type = other RNA
gctggacatagtggcaggtgcc

SEQ ID NO: 17949 - RNA, 22 nt, synthetic construct
  source 1..22: mol_type = other RNA
aacccagaacccgggaggcgga

SEQ ID NO: 17950 - RNA, 22 nt, synthetic construct
  source 1..22: mol_type = other RNA
cagcgagccaagatcatgccat

SEQ ID NO: 17951 - RNA, 22 nt, synthetic construct
  source 1..22: mol_type = other RNA
cactctagcctggcaataagag

SEQ ID NO: 17952 - RNA, 22 nt, synthetic construct
  source 1..22: mol_type = other RNA
gtagacatagggtgtcactatg

SEQ ID NO: 17953 - RNA, 22 nt, synthetic construct
  source 1..22: mol_type = other RNA
tagacatagggtgtcactatgt

SEQ ID NO: 17954 - RNA, 22 nt, synthetic construct
  source 1..22: mol_type = other RNA
cccaggctagcctccaactccc

SEQ ID NO: 17955 - RNA, 22 nt, synthetic construct
  source 1..22: mol_type = other RNA
gaattacaggcacaagccacct

SEQ ID NO: 17956 - RNA, 22 nt, synthetic construct
  source 1..22: mol_type = other RNA
caggcacaagccacctggccca

SEQ ID NO: 17957 - RNA, 22 nt, synthetic construct
  source 1..22: mol_type = other RNA
tattcaaataaaactttacgtc

SEQ ID NO: 17958 - RNA, 22 nt, synthetic construct
  source 1..22: mol_type = other RNA
aaataaaactttacgtcccatt

SEQ ID NO: 17959 - RNA, 22 nt, synthetic construct
  source 1..22: mol_type = other RNA
cgtcccattataaagggaaaaa

SEQ ID NO: 17960 - RNA, 22 nt, synthetic construct
  source 1..22: mol_type = other RNA
taaagggaaaaaatggcaaaaa

SEQ ID NO: 17961 - RNA, 22 nt, synthetic construct
  source 1..22: mol_type = other RNA
aacaagaaagcagagtgatgtt

SEQ ID NO: 17962 - RNA, 22 nt, synthetic construct
  source 1..22: mol_type = other RNA
acaagaaagcagagtgatgtta

SEQ ID NO: 17963 - RNA, 22 nt, synthetic construct
  source 1..22: mol_type = other RNA
gattatagcaagatactgttga

SEQ ID NO: 17964 - RNA, 22 nt, synthetic construct
  source 1..22: mol_type = other RNA
tagcaagatactgttgactgta

SEQ ID NO: 17965 - RNA, 22 nt, synthetic construct
  source 1..22: mol_type = other RNA
actgtagaaggctctgaggcta

SEQ ID NO: 17966 - RNA, 22 nt, synthetic construct
  source 1..22: mol_type = other RNA
tataaaacagagtgatcatata

SEQ ID NO: 17967 - RNA, 22 nt, synthetic construct
  source 1..22: mol_type = other RNA
gaagaggtgttaaagacatgtt

SEQ ID NO: 17968 - RNA, 22 nt, synthetic construct
  source 1..22: mol_type = other RNA
aagacatgttcacaccaagctg

SEQ ID NO: 17969 - RNA, 22 nt, synthetic construct
  source 1..22: mol_type = other RNA
acaccaagctgagacttcctcc

SEQ ID NO: 17970 - RNA, 22 nt, synthetic construct
  source 1..22: mol_type = other RNA
tccctatgggagtcagtattat

SEQ ID NO: 17971 - RNA, 22 nt, synthetic construct
  source 1..22: mol_type = other RNA
tttagcatcactttggcgggtc

SEQ ID NO: 17972 - RNA, 22 nt, synthetic construct
  source 1..22: mol_type = other RNA
agcatcactttggcgggtcacc

SEQ ID NO: 17973 - RNA, 22 nt, synthetic construct
  source 1..22: mol_type = other RNA
gcatcactttggcgggtcaccc

SEQ ID NO: 17974 - RNA, 22 nt, synthetic construct
  source 1..22: mol_type = other RNA
gcgggtcaccccaaaccatctg

SEQ ID NO: 17975 - RNA, 22 nt, synthetic construct
  source 1..22: mol_type = other RNA
gggttaacactcttttggtata

SEQ ID NO: 17976 - RNA, 22 nt, synthetic construct
  source 1..22: mol_type = other RNA
ggttaacactcttttggtataa

SEQ ID NO: 17977 - RNA, 22 nt, synthetic construct
  source 1..22: mol_type = other RNA
acactcttttggtataatttat

SEQ ID NO: 17978 - RNA, 22 nt, synthetic construct
  source 1..22: mol_type = other RNA
ggtataatttatgttttagtcc

SEQ ID NO: 17979 - RNA, 22 nt, synthetic construct
  source 1..22: mol_type = other RNA
gtataatttatgttttagtcca

SEQ ID NO: 17980 - RNA, 22 nt, synthetic construct
  source 1..22: mol_type = other RNA
atgttttagtccaatgtcttgg

SEQ ID NO: 17981 - RNA, 22 nt, synthetic construct
  source 1..22: mol_type = other RNA
tgttttagtccaatgtcttggg

SEQ ID NO: 17982 - RNA, 22 nt, synthetic construct
  source 1..22: mol_type = other RNA
tagtccaatgtcttgggatgaa

SEQ ID NO: 17983 - RNA, 22 nt, synthetic construct
  source 1..22: mol_type = other RNA
agtccaatgtcttgggatgaaa

SEQ ID NO: 17984 - RNA, 22 nt, synthetic construct
  source 1..22: mol_type = other RNA
gtccaatgtcttgggatgaaaa

SEQ ID NO: 17985 - RNA, 22 nt, synthetic construct
  source 1..22: mol_type = other RNA
agggcaatttggtgtgggagta

SEQ ID NO: 17986 - RNA, 22 nt, synthetic construct
  source 1..22: mol_type = other RNA
ggtgtgggagtaggcatggtag

SEQ ID NO: 17987 - RNA, 22 nt, synthetic construct
  source 1..22: mol_type = other RNA
gtgtgggagtaggcatggtaga

SEQ ID NO: 17988 - RNA, 22 nt, synthetic construct
  source 1..22: mol_type = other RNA
gcagctggcaccagtgcggttc

SEQ ID NO: 17989 - RNA, 22 nt, synthetic construct
  source 1..22: mol_type = other RNA
cattgtgatcatcatttctgaa

SEQ ID NO: 17990 - RNA, 22 nt, synthetic construct
  source 1..22: mol_type = other RNA
tgatcatcatttctgaacgtca

SEQ ID NO: 17991 - RNA, 22 nt, synthetic construct
  source 1..22: mol_type = other RNA
ctgaacgtcagactgttgaagg

SEQ ID NO: 17992 - RNA, 22 nt, synthetic construct
  source 1..22: mol_type = other RNA
tgaacgtcagactgttgaaggt

SEQ ID NO: 17993 - RNA, 22 nt, synthetic construct
  source 1..22: mol_type = other RNA
aaggttcccccaacagactttc

SEQ ID NO: 17994 - RNA, 22 nt, synthetic construct
  source 1..22: mol_type = other RNA
ccccaacagactttctgtgcaa

SEQ ID NO: 17995 - RNA, 22 nt, synthetic construct
  source 1..22: mol_type = other RNA
tgtgcaactttctgtcttcacc

SEQ ID NO: 17996 - RNA, 22 nt, synthetic construct
  source 1..22: mol_type = other RNA
tgtcttcaccaaattcagtcca

SEQ ID NO: 17997 - RNA, 22 nt, synthetic construct
  source 1..22: mol_type = other RNA
agtccacagtaaggaagtgaaa

SEQ ID NO: 17998 - RNA, 22 nt, synthetic construct
  source 1..22: mol_type = other RNA
atttcagaggtgtggggagggc

SEQ ID NO: 17999 - RNA, 22 nt, synthetic construct
  source 1..22: mol_type = other RNA
cagaggtgtggggagggcttaa

SEQ ID NO: 18000 - RNA, 22 nt, synthetic construct
  source 1..22: mol_type = other RNA
agaggtgtggggagggcttaag

SEQ ID NO: 18001 - RNA, 22 nt, synthetic construct
  source 1..22: mol_type = other RNA
gagggtgttcagaaacagaaat

SEQ ID NO: 18002 - RNA, 22 nt, synthetic construct
  source 1..22: mol_type = other RNA
agaaacagaaatctgaccgctt

SEQ ID NO: 18003 - RNA, 22 nt, synthetic construct
  source 1..22: mol_type = other RNA
ttttgatgatccctcacttgtt

SEQ ID NO: 18004 - RNA, 22 nt, synthetic construct
  source 1..22: mol_type = other RNA
tttgatgatccctcacttgttt

SEQ ID NO: 18005 - RNA, 22 nt, synthetic construct
  source 1..22: mol_type = other RNA
ttgatgatccctcacttgtttc

SEQ ID NO: 18006 - RNA, 22 nt, synthetic construct
  source 1..22: mol_type = other RNA
tgatgatccctcacttgtttct

SEQ ID NO: 18007 - RNA, 22 nt, synthetic construct
  source 1..22: mol_type = other RNA
gatgatccctcacttgtttctt

SEQ ID NO: 18008 - RNA, 22 nt, synthetic construct
  source 1..22: mol_type = other RNA
atgatccctcacttgtttcttt

SEQ ID NO: 18009 - RNA, 22 nt, synthetic construct
  source 1..22: mol_type = other RNA
ctttgcatgttggcttagcttg

SEQ ID NO: 18010 - RNA, 22 nt, synthetic construct
  source 1..22: mol_type = other RNA
tttgcatgttggcttagcttgg

SEQ ID NO: 18011 - RNA, 22 nt, synthetic construct
  source 1..22: mol_type = other RNA
catgttggcttagcttggcggg

SEQ ID NO: 18012 - RNA, 22 nt, synthetic construct
  source 1..22: mol_type = other RNA
gcttagcttggcgggctcccaa

SEQ ID NO: 18013 - RNA, 22 nt, synthetic construct
  source 1..22: mol_type = other RNA
gtgatgaggctagtgatgaggc

SEQ ID NO: 18014 - RNA, 22 nt, synthetic construct
  source 1..22: mol_type = other RNA
ctacacaatgcgttgcctggct

SEQ ID NO: 18015 - RNA, 22 nt, synthetic construct
  source 1..22: mol_type = other RNA
cctggctccacgccctgctggg

SEQ ID NO: 18016 - RNA, 22 nt, synthetic construct
  source 1..22: mol_type = other RNA
agcgtgcagtctcagctggtcc

SEQ ID NO: 18017 - RNA, 22 nt, synthetic construct
  source 1..22: mol_type = other RNA
gcgtgcagtctcagctggtcct

SEQ ID NO: 18018 - RNA, 22 nt, synthetic construct
  source 1..22: mol_type = other RNA
cagataaacagagaaaccattc

SEQ ID NO: 18019 - RNA, 22 nt, synthetic construct
  source 1..22: mol_type = other RNA
tgaattggggatgggggtgagg

SEQ ID NO: 18020 - RNA, 22 nt, synthetic construct
  source 1..22: mol_type = other RNA
gggatgggggtgaggatgggaa

SEQ ID NO: 18021 - RNA, 22 nt, synthetic construct
  source 1..22: mol_type = other RNA
gaagatgtgaaagagttgtcta

SEQ ID NO: 18022 - RNA, 22 nt, synthetic construct
  source 1..22: mol_type = other RNA
tctatttccttccaccggaggg

SEQ ID NO: 18023 - RNA, 22 nt, synthetic construct
  source 1..22: mol_type = other RNA
ccttccaccggagggagacttc

SEQ ID NO: 18024 - RNA, 22 nt, synthetic construct
  source 1..22: mol_type = other RNA
cttccaccggagggagacttca

SEQ ID NO: 18025 - RNA, 22 nt, synthetic construct
  source 1..22: mol_type = other RNA
tagaagtcagactttcgggcag

SEQ ID NO: 18026 - RNA, 22 nt, synthetic construct
  source 1..22: mol_type = other RNA
gggcagtgtgtcactaactctc

SEQ ID NO: 18027 - RNA, 22 nt, synthetic construct
  source 1..22: mol_type = other RNA
ggtaaatactgaggggtgcctc

SEQ ID NO: 18028 - RNA, 22 nt, synthetic construct
  source 1..22: mol_type = other RNA
gagtcagccttgaggtgtagct

SEQ ID NO: 18029 - RNA, 22 nt, synthetic construct
  source 1..22: mol_type = other RNA
agccctcagcagctggggagag

SEQ ID NO: 18030 - RNA, 22 nt, synthetic construct
  source 1..22: mol_type = other RNA
cctaatggtgttgtttaaaaag

SEQ ID NO: 18031 - RNA, 22 nt, synthetic construct
  source 1..22: mol_type = other RNA
ctaatggtgttgtttaaaaagg

SEQ ID NO: 18032 - RNA, 22 nt, synthetic construct
  source 1..22: mol_type = other RNA
tttaaaaagggtcaggggacgg

SEQ ID NO: 18033 - RNA, 22 nt, synthetic construct
  source 1..22: mol_type = other RNA
aaaaagggtcaggggacggggg

SEQ ID NO: 18034 - RNA, 22 nt, synthetic construct
  source 1..22: mol_type = other RNA
aaaagggtcaggggacggggga

SEQ ID NO: 18035 - RNA, 22 nt, synthetic construct
  source 1..22: mol_type = other RNA
gctgggaagggtgtgcccctga

SEQ ID NO: 18036 - RNA, 22 nt, synthetic construct
  source 1..22: mol_type = other RNA
acattctcgagtcaattttcct

SEQ ID NO: 18037 - RNA, 22 nt, synthetic construct
  source 1..22: mol_type = other RNA
cattctcgagtcaattttcctg

SEQ ID NO: 18038 - RNA, 22 nt, synthetic construct
  source 1..22: mol_type = other RNA
tcgagtcaattttcctggagtg

SEQ ID NO: 18039 - RNA, 22 nt, synthetic construct
  source 1..22: mol_type = other RNA
tcctggagtgtacaatggacct

SEQ ID NO: 18040 - RNA, 22 nt, synthetic construct
  source 1..22: mol_type = other RNA
cctggagtgtacaatggacctg

SEQ ID NO: 18041 - RNA, 22 nt, synthetic construct
  source 1..22: mol_type = other RNA
ctggagtgtacaatggacctgt

SEQ ID NO: 18042 - RNA, 22 nt, synthetic construct
  source 1..22: mol_type = other RNA
tataggaactggaattgagctc

SEQ ID NO: 18043 - RNA, 22 nt, synthetic construct
  source 1..22: mol_type = other RNA
ataggaactggaattgagctca

SEQ ID NO: 18044 - RNA, 22 nt, synthetic construct
  source 1..22: mol_type = other RNA
taggaactggaattgagctcat

SEQ ID NO: 18045 - RNA, 22 nt, synthetic construct
  source 1..22: mol_type = other RNA
agctcataggagctcaatttta

SEQ ID NO: 18046 - RNA, 22 nt, synthetic construct
  source 1..22: mol_type = other RNA
tattggcattgctgttgttgga

SEQ ID NO: 18047 - RNA, 22 nt, synthetic construct
  source 1..22: mol_type = other RNA
attggcattgctgttgttggat

SEQ ID NO: 18048 - RNA, 22 nt, synthetic construct
  source 1..22: mol_type = other RNA
ttggcattgctgttgttggatg

SEQ ID NO: 18049 - RNA, 22 nt, synthetic construct
  source 1..22: mol_type = other RNA
gcattgctgttgttggatggtt

SEQ ID NO: 18050 - RNA, 22 nt, synthetic construct
  source 1..22: mol_type = other RNA
ctgttgttggatggttaaaggg

SEQ ID NO: 18051 - RNA, 22 nt, synthetic construct
  source 1..22: mol_type = other RNA
ttggatggttaaaggggtggta

SEQ ID NO: 18052 - RNA, 22 nt, synthetic construct
  source 1..22: mol_type = other RNA
gatggttaaaggggtggtatcc

SEQ ID NO: 18053 - RNA, 22 nt, synthetic construct
  source 1..22: mol_type = other RNA
aaggggtggtatcccttttctc

SEQ ID NO: 18054 - RNA, 22 nt, synthetic construct
  source 1..22: mol_type = other RNA
ctcagactcccctgaaatgtat

SEQ ID NO: 18055 - RNA, 22 nt, synthetic construct
  source 1..22: mol_type = other RNA
tcagactcccctgaaatgtatg

SEQ ID NO: 18056 - RNA, 22 nt, synthetic construct
  source 1..22: mol_type = other RNA
gctttgaacccagagactgatg

SEQ ID NO: 18057 - RNA, 22 nt, synthetic construct
  source 1..22: mol_type = other RNA
ctttgaacccagagactgatga

SEQ ID NO: 18058 - RNA, 22 nt, synthetic construct
  source 1..22: mol_type = other RNA
aacccagagactgatgacaggt

SEQ ID NO: 18059 - RNA, 22 nt, synthetic construct
  source 1..22: mol_type = other RNA
ggtgcagccttaagttgctacg

SEQ ID NO: 18060 - RNA, 22 nt, synthetic construct
  source 1..22: mol_type = other RNA
ctacgggaaagtgttggagggg

SEQ ID NO: 18061 - RNA, 22 nt, synthetic construct
  source 1..22: mol_type = other RNA
gagggggagaagtcagaggtaa

SEQ ID NO: 18062 - RNA, 22 nt, synthetic construct
  source 1..22: mol_type = other RNA
cagatgaggaaattcaggcctg

SEQ ID NO: 18063 - RNA, 22 nt, synthetic construct
  source 1..22: mol_type = other RNA
aggcctgaaaagggaaagtgac

SEQ ID NO: 18064 - RNA, 22 nt, synthetic construct
  source 1..22: mol_type = other RNA
tccatccatggaaggtacctga

SEQ ID NO: 18065 - RNA, 22 nt, synthetic construct
  source 1..22: mol_type = other RNA
ccatccatggaaggtacctgag

SEQ ID NO: 18066 - RNA, 22 nt, synthetic construct
  source 1..22: mol_type = other RNA
catccatggaaggtacctgagg

SEQ ID NO: 18067 - RNA, 22 nt, synthetic construct
  source 1..22: mol_type = other RNA
tctcttcctccctagggccagc

SEQ ID NO: 18068 - RNA, 22 nt, synthetic construct
  source 1..22: mol_type = other RNA
ctcttcctccctagggccagca

SEQ ID NO: 18069 - RNA, 22 nt, synthetic construct
  source 1..22: mol_type = other RNA
tcttcctccctagggccagcat

SEQ ID NO: 18070 - RNA, 22 nt, synthetic construct
  source 1..22: mol_type = other RNA
gctcatctcaggggccatgtgc

SEQ ID NO: 18071 - RNA, 22 nt, synthetic construct
  source 1..22: mol_type = other RNA
gccactttcacggttggactga

SEQ ID NO: 18072 - RNA, 22 nt, synthetic construct
  source 1..22: mol_type = other RNA
ccactttcacggttggactgag

SEQ ID NO: 18073 - RNA, 22 nt, synthetic construct
  source 1..22: mol_type = other RNA
acggttggactgagttggagag

SEQ ID NO: 18074 - RNA, 22 nt, synthetic construct
  source 1..22: mol_type = other RNA
gactgagttggagagaaacaga

SEQ ID NO: 18075 - RNA, 22 nt, synthetic construct
  source 1..22: mol_type = other RNA
gagagaaacagagacccaccca

SEQ ID NO: 18076 - RNA, 22 nt, synthetic construct
  source 1..22: mol_type = other RNA
ggatgccacttctgataaagca

SEQ ID NO: 18077 - RNA, 22 nt, synthetic construct
  source 1..22: mol_type = other RNA
ctccacagcctggcccgagctc

SEQ ID NO: 18078 - RNA, 22 nt, synthetic construct
  source 1..22: mol_type = other RNA
ccagcatccccgcaacgactct

SEQ ID NO: 18079 - RNA, 22 nt, synthetic construct
  source 1..22: mol_type = other RNA
cagcatccccgcaacgactctg

SEQ ID NO: 18080 - RNA, 22 nt, synthetic construct
  source 1..22: mol_type = other RNA
gaccagggccgccgttccctga

SEQ ID NO: 18081 - RNA, 22 nt, synthetic construct
  source 1..22: mol_type = other RNA
cctgagcttcactttccctgtt

SEQ ID NO: 18082 - RNA, 22 nt, synthetic construct
  source 1..22: mol_type = other RNA
cctgttgggtcatattccatct

SEQ ID NO: 18083 - RNA, 22 nt, synthetic construct
  source 1..22: mol_type = other RNA
ggtcatattccatctctaactc

SEQ ID NO: 18084 - RNA, 22 nt, synthetic construct
  source 1..22: mol_type = other RNA
catctctaactctggaatcttg

SEQ ID NO: 18085 - RNA, 22 nt, synthetic construct
  source 1..22: mol_type = other RNA
ggctctccaggcggggggccct

SEQ ID NO: 18086 - RNA, 22 nt, synthetic construct
  source 1..22: mol_type = other RNA
accagaggatgggataagtcct

SEQ ID NO: 18087 - RNA, 22 nt, synthetic construct
  source 1..22: mol_type = other RNA
aacatcttggcgaaggtgtgtg

SEQ ID NO: 18088 - RNA, 22 nt, synthetic construct
  source 1..22: mol_type = other RNA
ttgggaggggtgggggagggat

SEQ ID NO: 18089 - RNA, 22 nt, synthetic construct
  source 1..22: mol_type = other RNA
ggaggggtgggggagggatccc

SEQ ID NO: 18090 - RNA, 22 nt, synthetic construct
  source 1..22: mol_type = other RNA
gggccctgagtcacaccctcta

SEQ ID NO: 18091 - RNA, 22 nt, synthetic construct
  source 1..22: mol_type = other RNA
gatctccctggggtccaggaaa

SEQ ID NO: 18092 - RNA, 22 nt, synthetic construct
  source 1..22: mol_type = other RNA
aaggcatggctccctccccagc

SEQ ID NO: 18093 - RNA, 22 nt, synthetic construct
  source 1..22: mol_type = other RNA
gcaggaagtcttccgtttctgc

SEQ ID NO: 18094 - RNA, 22 nt, synthetic construct
  source 1..22: mol_type = other RNA
ctgctccccactccagagaaaa

SEQ ID NO: 18095 - RNA, 22 nt, synthetic construct
  source 1..22: mol_type = other RNA
tgctccccactccagagaaaaa

SEQ ID NO: 18096 - RNA, 22 nt, synthetic construct
  source 1..22: mol_type = other RNA
aggaaacaggtacttcttcctc

SEQ ID NO: 18097 - RNA, 22 nt, synthetic construct
  source 1..22: mol_type = other RNA
ggaggcagggtctttggagatg

SEQ ID NO: 18098 - RNA, 22 nt, synthetic construct
  source 1..22: mol_type = other RNA
gaggcagggtctttggagatga

SEQ ID NO: 18099 - RNA, 22 nt, synthetic construct
  source 1..22: mol_type = other RNA
gagatgactgagtggggaatcc

SEQ ID NO: 18100 - RNA, 22 nt, synthetic construct
  source 1..22: mol_type = other RNA
aggatgtaggttcccgggctca

SEQ ID NO: 18101 - RNA, 22 nt, synthetic construct
  source 1..22: mol_type = other RNA
ccgggctcacccccaggcccgg

SEQ ID NO: 18102 - RNA, 22 nt, synthetic construct
  source 1..22: mol_type = other RNA
gctaggcctggggtgaggctga

SEQ ID NO: 18103 - RNA, 22 nt, synthetic construct
  source 1..22: mol_type = other RNA
aaccatctatcccaggtgactc

SEQ ID NO: 18104 - RNA, 22 nt, synthetic construct
  source 1..22: mol_type = other RNA
gtttgtggggcaaaagtccctc

SEQ ID NO: 18105 - RNA, 22 nt, synthetic construct
  source 1..22: mol_type = other RNA
gtggggcaaaagtccctcaagt

SEQ ID NO: 18106 - RNA, 22 nt, synthetic construct
  source 1..22: mol_type = other RNA
tggggcaaaagtccctcaagtc

SEQ ID NO: 18107 - RNA, 22 nt, synthetic construct
  source 1..22: mol_type = other RNA
ctctctccctgttacaaaacct

SEQ ID NO: 18108 - RNA, 22 nt, synthetic construct
  source 1..22: mol_type = other RNA
caaaacctctatcagaaaagga

SEQ ID NO: 18109 - RNA, 22 nt, synthetic construct
  source 1..22: mol_type = other RNA
tgttttgttttgcttaacgcca

SEQ ID NO: 18110 - RNA, 22 nt, synthetic construct
  source 1..22: mol_type = other RNA
gttttgttttgcttaacgccac

SEQ ID NO: 18111 - RNA, 22 nt, synthetic construct
  source 1..22: mol_type = other RNA
ttttgttttgcttaacgccaca

SEQ ID NO: 18112 - RNA, 22 nt, synthetic construct
  source 1..22: mol_type = other RNA
tgttttgcttaacgccacatag

SEQ ID NO: 18113 - RNA, 22 nt, synthetic construct
  source 1..22: mol_type = other RNA
gttttgcttaacgccacatagc

SEQ ID NO: 18114 - RNA, 22 nt, synthetic construct
  source 1..22: mol_type = other RNA
ttttgcttaacgccacatagca

SEQ ID NO: 18115 - RNA, 22 nt, synthetic construct
  source 1..22: mol_type = other RNA
tgcttaacgccacatagcaagc

SEQ ID NO: 18116 - RNA, 22 nt, synthetic construct
  source 1..22: mol_type = other RNA
gcttaacgccacatagcaagca

SEQ ID NO: 18117 - RNA, 22 nt, synthetic construct
  source 1..22: mol_type = other RNA
cttaacgccacatagcaagcag

SEQ ID NO: 18118 - RNA, 22 nt, synthetic construct
  source 1..22: mol_type = other RNA
gcagacgcaggatttgaaccct

SEQ ID NO: 18119 - RNA, 22 nt, synthetic construct
  source 1..22: mol_type = other RNA
cagacgcaggatttgaaccctg

SEQ ID NO: 18120 - RNA, 22 nt, synthetic construct
  source 1..22: mol_type = other RNA
gaaccctggtctactgagagcc

SEQ ID NO: 18121 - RNA, 22 nt, synthetic construct
  source 1..22: mol_type = other RNA
aaccctggtctactgagagccc

SEQ ID NO: 18122 - RNA, 22 nt, synthetic construct
  source 1..22: mol_type = other RNA
catgtcctaagacccagcctca

SEQ ID NO: 18123 - RNA, 22 nt, synthetic construct
  source 1..22: mol_type = other RNA
atgtcctaagacccagcctcag

SEQ ID NO: 18124 - RNA, 22 nt, synthetic construct
  source 1..22: mol_type = other RNA
acccaaggaaactctggattag

SEQ ID NO: 18125 - RNA, 22 nt, synthetic construct
  source 1..22: mol_type = other RNA
gttccaggcaatcagggaagtg

SEQ ID NO: 18126 - RNA, 22 nt, synthetic construct
  source 1..22: mol_type = other RNA
caggcaatcagggaagtggctg

SEQ ID NO: 18127 - RNA, 22 nt, synthetic construct
  source 1..22: mol_type = other RNA
gccttgagtcacactgacaagt

SEQ ID NO: 18128 - RNA, 22 nt, synthetic construct
  source 1..22: mol_type = other RNA
ccttgagtcacactgacaagtg

SEQ ID NO: 18129 - RNA, 22 nt, synthetic construct
  source 1..22: mol_type = other RNA
atctgtaaaatggataaaacat

SEQ ID NO: 18130 - RNA, 22 nt, synthetic construct
  source 1..22: mol_type = other RNA
gaaaaccaccaaagaatattca

SEQ ID NO: 18131 - RNA, 22 nt, synthetic construct
  source 1..22: mol_type = other RNA
atgcattgggaataattattat

SEQ ID NO: 18132 - RNA, 22 nt, synthetic construct
  source 1..22: mol_type = other RNA
ggaataattattatagatccta

SEQ ID NO: 18133 - RNA, 22 nt, synthetic construct
  source 1..22: mol_type = other RNA
ttatagatcctaaagggattgt

SEQ ID NO: 18134 - RNA, 22 nt, synthetic construct
  source 1..22: mol_type = other RNA
tagatcctaaagggattgttta

SEQ ID NO: 18135 - RNA, 22 nt, synthetic construct
  source 1..22: mol_type = other RNA
tttagaaagatcagagaggggc

SEQ ID NO: 18136 - RNA, 22 nt, synthetic construct
  source 1..22: mol_type = other RNA
agaaagatcagagaggggccgg

SEQ ID NO: 18137 - RNA, 22 nt, synthetic construct
  source 1..22: mol_type = other RNA
gaaagatcagagaggggccggg

SEQ ID NO: 18138 - RNA, 22 nt, synthetic construct
  source 1..22: mol_type = other RNA
acacctgtaatcctagcacttt

SEQ ID NO: 18139 - RNA, 22 nt, synthetic construct
  source 1..22: mol_type = other RNA
ggaggccgaggcgggtggattg

SEQ ID NO: 18140 - RNA, 22 nt, synthetic construct
  source 1..22: mol_type = other RNA
cttgaggccaggagttcaagac

SEQ ID NO: 18141 - RNA, 22 nt, synthetic construct
  source 1..22: mol_type = other RNA
aagaccagcctgggcaacctgg

SEQ ID NO: 18142 - RNA, 22 nt, synthetic construct
  source 1..22: mol_type = other RNA
ttgtgttttagccgggcatggt

SEQ ID NO: 18143 - RNA, 22 nt, synthetic construct
  source 1..22: mol_type = other RNA
tgtgttttagccgggcatggtg

SEQ ID NO: 18144 - RNA, 22 nt, synthetic construct
  source 1..22: mol_type = other RNA
gtgttttagccgggcatggtgg

SEQ ID NO: 18145 - RNA, 22 nt, synthetic construct
  source 1..22: mol_type = other RNA
tgttttagccgggcatggtggt

SEQ ID NO: 18146 - RNA, 22 nt, synthetic construct
  source 1..22: mol_type = other RNA
tagccgggcatggtggtgcaca

SEQ ID NO: 18147 - RNA, 22 nt, synthetic construct
  source 1..22: mol_type = other RNA
agccgggcatggtggtgcacac

SEQ ID NO: 18148 - RNA, 22 nt, synthetic construct
  source 1..22: mol_type = other RNA
gccgggcatggtggtgcacacc

SEQ ID NO: 18149 - RNA, 22 nt, synthetic construct
  source 1..22: mol_type = other RNA
acccgagaggtggaggttaccc

SEQ ID NO: 18150 - RNA, 22 nt, synthetic construct
  source 1..22: mol_type = other RNA
cccgagaggtggaggttacccg

SEQ ID NO: 18151 - RNA, 22 nt, synthetic construct
  source 1..22: mol_type = other RNA
cccgagagctgagattgcacca

SEQ ID NO: 18152 - RNA, 22 nt, synthetic construct
  source 1..22: mol_type = other RNA
caccactgcacgccagcctggg

SEQ ID NO: 18153 - RNA, 22 nt, synthetic construct
  source 1..22: mol_type = other RNA
ccaaagaccaagacacacacag

SEQ ID NO: 18154 - RNA, 22 nt, synthetic construct
  source 1..22: mol_type = other RNA
caaagaccaagacacacacagt

SEQ ID NO: 18155 - RNA, 22 nt, synthetic construct
  source 1..22: mol_type = other RNA
agaaaggggcattagttaccac

SEQ ID NO: 18156 - RNA, 22 nt, synthetic construct
  source 1..22: mol_type = other RNA
gttaccaccgattctcatagga

SEQ ID NO: 18157 - RNA, 22 nt, synthetic construct
  source 1..22: mol_type = other RNA
ccaccgattctcataggaagga

SEQ ID NO: 18158 - RNA, 22 nt, synthetic construct
  source 1..22: mol_type = other RNA
tcataggaaggacatagatagt

SEQ ID NO: 18159 - RNA, 22 nt, synthetic construct
  source 1..22: mol_type = other RNA
tcagattccttcaatccttctg

SEQ ID NO: 18160 - RNA, 22 nt, synthetic construct
  source 1..22: mol_type = other RNA
cagattccttcaatccttctga

SEQ ID NO: 18161 - RNA, 22 nt, synthetic construct
  source 1..22: mol_type = other RNA
agattccttcaatccttctgac

SEQ ID NO: 18162 - RNA, 22 nt, synthetic construct
  source 1..22: mol_type = other RNA
cttcaatccttctgacatcaag

SEQ ID NO: 18163 - RNA, 22 nt, synthetic construct
  source 1..22: mol_type = other RNA
tccctgatgtttgacagtgccc

SEQ ID NO: 18164 - RNA, 22 nt, synthetic construct
  source 1..22: mol_type = other RNA
ccctgatgtttgacagtgccct

SEQ ID NO: 18165 - RNA, 22 nt, synthetic construct
  source 1..22: mol_type = other RNA
cctgatgtttgacagtgcccta

SEQ ID NO: 18166 - RNA, 22 nt, synthetic construct
  source 1..22: mol_type = other RNA
gacagtgccctaatgcttgcta

SEQ ID NO: 18167 - RNA, 22 nt, synthetic construct
  source 1..22: mol_type = other RNA
acagtgccctaatgcttgctaa

SEQ ID NO: 18168 - RNA, 22 nt, synthetic construct
  source 1..22: mol_type = other RNA
ctttttaacaaagtggtaaaga

SEQ ID NO: 18169 - RNA, 22 nt, synthetic construct
  source 1..22: mol_type = other RNA
tttttaacaaagtggtaaagaa

SEQ ID NO: 18170 - RNA, 22 nt, synthetic construct
  source 1..22: mol_type = other RNA
taacaaagtggtaaagaagctg

SEQ ID NO: 18171 - RNA, 22 nt, synthetic construct
  source 1..22: mol_type = other RNA
aacaaagtggtaaagaagctga

SEQ ID NO: 18172 - RNA, 22 nt, synthetic construct
  source 1..22: mol_type = other RNA
acaaagtggtaaagaagctgag

SEQ ID NO: 18173 - RNA, 22 nt, synthetic construct
  source 1..22: mol_type = other RNA
ttttagtaacattgtttctttt

SEQ ID NO: 18174 - RNA, 22 nt, synthetic construct
  source 1..22: mol_type = other RNA
tagtaacattgtttctttttca

SEQ ID NO: 18175 - RNA, 22 nt, synthetic construct
  source 1..22: mol_type = other RNA
agtaacattgtttctttttcaa

SEQ ID NO: 18176 - RNA, 22 nt, synthetic construct
  source 1..22: mol_type = other RNA
gtaacattgtttctttttcaac

SEQ ID NO: 18177 - RNA, 22 nt, synthetic construct
  source 1..22: mol_type = other RNA
tttctttttcaaccacaagtga

SEQ ID NO: 18178 - RNA, 22 nt, synthetic construct
  source 1..22: mol_type = other RNA
ctttttcaaccacaagtgatac

SEQ ID NO: 18179 - RNA, 22 nt, synthetic construct
  source 1..22: mol_type = other RNA
tttttcaaccacaagtgatact

SEQ ID NO: 18180 - RNA, 22 nt, synthetic construct
  source 1..22: mol_type = other RNA
tcaaccacaagtgatactgttg

SEQ ID NO: 18181 - RNA, 22 nt, synthetic construct
  source 1..22: mol_type = other RNA
caaccacaagtgatactgttgg

SEQ ID NO: 18182 - RNA, 22 nt, synthetic construct
  source 1..22: mol_type = other RNA
aaccacaagtgatactgttggt

SEQ ID NO: 18183 - RNA, 22 nt, synthetic construct
  source 1..22: mol_type = other RNA
gtttggttttgcttttccgttt

SEQ ID NO: 18184 - RNA, 22 nt, synthetic construct
  source 1..22: mol_type = other RNA
ggttttgcttttccgtttatac

SEQ ID NO: 18185 - RNA, 22 nt, synthetic construct
  source 1..22: mol_type = other RNA
gttttgcttttccgtttataca

SEQ ID NO: 18186 - RNA, 22 nt, synthetic construct
  source 1..22: mol_type = other RNA
tgcttttccgtttatacatgga

SEQ ID NO: 18187 - RNA, 22 nt, synthetic construct
  source 1..22: mol_type = other RNA
gcttttccgtttatacatggaa

SEQ ID NO: 18188 - RNA, 22 nt, synthetic construct
  source 1..22: mol_type = other RNA
cttttccgtttatacatggaaa

SEQ ID NO: 18189 - RNA, 22 nt, synthetic construct
  source 1..22: mol_type = other RNA
ccgtttatacatggaaaaaaaa

SEQ ID NO: 18190 - RNA, 22 nt, synthetic construct
  source 1..22: mol_type = other RNA
cgtttatacatggaaaaaaaag

SEQ ID NO: 18191 - RNA, 22 nt, synthetic construct
  source 1..22: mol_type = other RNA
atacatggaaaaaaaagttttc

SEQ ID NO: 18192 - RNA, 22 nt, synthetic construct
  source 1..22: mol_type = other RNA
tacatggaaaaaaaagttttct

SEQ ID NO: 18193 - RNA, 22 nt, synthetic construct
  source 1..22: mol_type = other RNA
tctttttgtaaaatcatggtaa

SEQ ID NO: 18194 - RNA, 22 nt, synthetic construct
  source 1..22: mol_type = other RNA
ctttttgtaaaatcatggtaaa

SEQ ID NO: 18195 - RNA, 22 nt, synthetic construct
  source 1..22: mol_type = other RNA
tttttgtaaaatcatggtaaaa

SEQ ID NO: 18196 - RNA, 22 nt, synthetic construct
  source 1..22: mol_type = other RNA
tgtaaaatcatggtaaaataca

SEQ ID NO: 18197 - RNA, 22 nt, synthetic construct
  source 1..22: mol_type = other RNA
gtaaaatcatggtaaaatacat

SEQ ID NO: 18198 - RNA, 22 nt, synthetic construct
  source 1..22: mol_type = other RNA
taaaatcatggtaaaatacata

SEQ ID NO: 18199 - RNA, 22 nt, synthetic construct
  source 1..22: mol_type = other RNA
accattttaaccactttcaaat

SEQ ID NO: 18200 - RNA, 22 nt, synthetic construct
  source 1..22: mol_type = other RNA
ccattttaaccactttcaaatg

SEQ ID NO: 18201 - RNA, 22 nt, synthetic construct
  source 1..22: mol_type = other RNA
taaccactttcaaatgtacatt

SEQ ID NO: 18202 - RNA, 22 nt, synthetic construct
  source 1..22: mol_type = other RNA
aaccactttcaaatgtacattt

SEQ ID NO: 18203 - RNA, 22 nt, synthetic construct
  source 1..22: mol_type = other RNA
accactttcaaatgtacatttc

SEQ ID NO: 18204 - RNA, 22 nt, synthetic construct
  source 1..22: mol_type = other RNA
aaatgtacatttcagtggcatt

SEQ ID NO: 18205 - RNA, 22 nt, synthetic construct
  source 1..22: mol_type = other RNA
cagtggcattaaatatttcaaa

SEQ ID NO: 18206 - RNA, 22 nt, synthetic construct
  source 1..22: mol_type = other RNA
agtggcattaaatatttcaaac

SEQ ID NO: 18207 - RNA, 22 nt, synthetic construct
  source 1..22: mol_type = other RNA
aatatttcaaactgttgtgcaa

SEQ ID NO: 18208 - RNA, 22 nt, synthetic construct
  source 1..22: mol_type = other RNA
caaactgttgtgcaacctccgc

SEQ ID NO: 18209 - RNA, 22 nt, synthetic construct
  source 1..22: mol_type = other RNA
aaactgttgtgcaacctccgct

SEQ ID NO: 18210 - RNA, 22 nt, synthetic construct
  source 1..22: mol_type = other RNA
tgcaacctccgctaccatccat

SEQ ID NO: 18211 - RNA, 22 nt, synthetic construct
  source 1..22: mol_type = other RNA
tcatcctcccaaactgaaactc

SEQ ID NO: 18212 - RNA, 22 nt, synthetic construct
  source 1..22: mol_type = other RNA
catcctcccaaactgaaactct

SEQ ID NO: 18213 - RNA, 22 nt, synthetic construct
  source 1..22: mol_type = other RNA
atcctcccaaactgaaactcta

SEQ ID NO: 18214 - RNA, 22 nt, synthetic construct
  source 1..22: mol_type = other RNA
tgggctactctagacaccgcct

SEQ ID NO: 18215 - RNA, 22 nt, synthetic construct
  source 1..22: mol_type = other RNA
gggctactctagacaccgccta

SEQ ID NO: 18216 - RNA, 22 nt, synthetic construct
  source 1..22: mol_type = other RNA
ggctactctagacaccgcctat

SEQ ID NO: 18217 - RNA, 22 nt, synthetic construct
  source 1..22: mol_type = other RNA
cgtgatatttgtctttttgtgc

SEQ ID NO: 18218 - RNA, 22 nt, synthetic construct
  source 1..22: mol_type = other RNA
gtctttttgtgcctggcttctt

SEQ ID NO: 18219 - RNA, 22 nt, synthetic construct
  source 1..22: mol_type = other RNA
tctttttgtgcctggcttcttt

SEQ ID NO: 18220 - RNA, 22 nt, synthetic construct
  source 1..22: mol_type = other RNA
tgtgcctggcttctttcactta

SEQ ID NO: 18221 - RNA, 22 nt, synthetic construct
  source 1..22: mol_type = other RNA
gtgcctggcttctttcacttag

SEQ ID NO: 18222 - RNA, 22 nt, synthetic construct
  source 1..22: mol_type = other RNA
tgcctggcttctttcacttagc

SEQ ID NO: 18223 - RNA, 22 nt, synthetic construct
  source 1..22: mol_type = other RNA
acttagcataatgtcttccagg

SEQ ID NO: 18224 - RNA, 22 nt, synthetic construct
  source 1..22: mol_type = other RNA
atccatgtcgtgccatgtgtaa

SEQ ID NO: 18225 - RNA, 22 nt, synthetic construct
  source 1..22: mol_type = other RNA
ctttctatggcggaatagtatt

SEQ ID NO: 18226 - RNA, 22 nt, synthetic construct
  source 1..22: mol_type = other RNA
tatggcggaatagtattctaat

SEQ ID NO: 18227 - RNA, 22 nt, synthetic construct
  source 1..22: mol_type = other RNA
taatatgtggatatcccatatt

SEQ ID NO: 18228 - RNA, 22 nt, synthetic construct
  source 1..22: mol_type = other RNA
tgttcatccattcatttgttga

SEQ ID NO: 18229 - RNA, 22 nt, synthetic construct
  source 1..22: mol_type = other RNA
gttcatccattcatttgttgat

SEQ ID NO: 18230 - RNA, 22 nt, synthetic construct
  source 1..22: mol_type = other RNA
ttcatccattcatttgttgata

SEQ ID NO: 18231 - RNA, 22 nt, synthetic construct
  source 1..22: mol_type = other RNA
atccattcatttgttgatagac

SEQ ID NO: 18232 - RNA, 22 nt, synthetic construct
  source 1..22: mol_type = other RNA
atttgttgatagacacttgggt

SEQ ID NO: 18233 - RNA, 22 nt, synthetic construct
  source 1..22: mol_type = other RNA
gttgatagacacttgggttgtt

SEQ ID NO: 18234 - RNA, 22 nt, synthetic construct
  source 1..22: mol_type = other RNA
ttgatagacacttgggttgttc

SEQ ID NO: 18235 - RNA, 22 nt, synthetic construct
  source 1..22: mol_type = other RNA
atagacacttgggttgttccta

SEQ ID NO: 18236 - RNA, 22 nt, synthetic construct
  source 1..22: mol_type = other RNA
ttcctacctcttgactattgtg

SEQ ID NO: 18237 - RNA, 22 nt, synthetic construct
  source 1..22: mol_type = other RNA
ctacctcttgactattgtgaat

SEQ ID NO: 18238 - RNA, 22 nt, synthetic construct
  source 1..22: mol_type = other RNA
tgaataatcttgctaggtacat

SEQ ID NO: 18239 - RNA, 22 nt, synthetic construct
  source 1..22: mol_type = other RNA
aactctagaaagctttctttta

SEQ ID NO: 18240 - RNA, 22 nt, synthetic construct
  source 1..22: mol_type = other RNA
ttttaaaatcggtctatttaag

SEQ ID NO: 18241 - RNA, 22 nt, synthetic construct
  source 1..22: mol_type = other RNA
aaaatcggtctatttaagtttc

SEQ ID NO: 18242 - RNA, 22 nt, synthetic construct
  source 1..22: mol_type = other RNA
aaatcggtctatttaagtttct

SEQ ID NO: 18243 - RNA, 22 nt, synthetic construct
  source 1..22: mol_type = other RNA
aagtttctttaaaaagttaatt

SEQ ID NO: 18244 - RNA, 22 nt, synthetic construct
  source 1..22: mol_type = other RNA
agtttctttaaaaagttaattt

SEQ ID NO: 18245 - RNA, 22 nt, synthetic construct
  source 1..22: mol_type = other RNA
ctttaaaaagttaatttaagaa

SEQ ID NO: 18246 - RNA, 22 nt, synthetic construct
  source 1..22: mol_type = other RNA
tttaaaaagttaatttaagaaa

SEQ ID NO: 18247 - RNA, 22 nt, synthetic construct
  source 1..22: mol_type = other RNA
aaaagttaatttaagaaaaata

SEQ ID NO: 18248 - RNA, 22 nt, synthetic construct
  source 1..22: mol_type = other RNA
atttaagaaaaatactaaggta

SEQ ID NO: 18249 - RNA, 22 nt, synthetic construct
  source 1..22: mol_type = other RNA
aagaaaaatactaaggtaaatt

SEQ ID NO: 18250 - RNA, 22 nt, synthetic construct
  source 1..22: mol_type = other RNA
agaaaaatactaaggtaaattg

SEQ ID NO: 18251 - RNA, 22 nt, synthetic construct
  source 1..22: mol_type = other RNA
tagaacaggtgatatgtcaata

SEQ ID NO: 18252 - RNA, 22 nt, synthetic construct
  source 1..22: mol_type = other RNA
taaagatggaagacgaatgcct

SEQ ID NO: 18253 - RNA, 22 nt, synthetic construct
  source 1..22: mol_type = other RNA
gggaaaccggatgagaggaaag

SEQ ID NO: 18254 - RNA, 22 nt, synthetic construct
  source 1..22: mol_type = other RNA
ggaaaccggatgagaggaaaga

SEQ ID NO: 18255 - RNA, 22 nt, synthetic construct
  source 1..22: mol_type = other RNA
taaaatctatgctgagggtctg

SEQ ID NO: 18256 - RNA, 22 nt, synthetic construct
  source 1..22: mol_type = other RNA
agaaaggggcctggtgcagtgg

SEQ ID NO: 18257 - RNA, 22 nt, synthetic construct
  source 1..22: mol_type = other RNA
catcaccttgggaggtcaaggc

SEQ ID NO: 18258 - RNA, 22 nt, synthetic construct
  source 1..22: mol_type = other RNA
aagaccagcctgggcaacagag

SEQ ID NO: 18259 - RNA, 22 nt, synthetic construct
  source 1..22: mol_type = other RNA
tttaggaaaaaaatatataaat

SEQ ID NO: 18260 - RNA, 22 nt, synthetic construct
  source 1..22: mol_type = other RNA
ttaggaaaaaaatatataaatt

SEQ ID NO: 18261 - RNA, 22 nt, synthetic construct
  source 1..22: mol_type = other RNA
taggaaaaaaatatataaatta

SEQ ID NO: 18262 - RNA, 22 nt, synthetic construct
  source 1..22: mol_type = other RNA
aggaaaaaaatatataaattaa

SEQ ID NO: 18263 - RNA, 22 nt, synthetic construct
  source 1..22: mol_type = other RNA
ggaaaaaaatatataaattaat

SEQ ID NO: 18264 - RNA, 22 nt, synthetic construct
  source 1..22: mol_type = other RNA
ataaaaataaatttttgaaaat

SEQ ID NO: 18265 - RNA, 22 nt, synthetic construct
  source 1..22: mol_type = other RNA
ttgaaaatacagattccaggcc

SEQ ID NO: 18266 - RNA, 22 nt, synthetic construct
  source 1..22: mol_type = other RNA
tgaaaatacagattccaggccg

SEQ ID NO: 18267 - RNA, 22 nt, synthetic construct
  source 1..22: mol_type = other RNA
gaaaatacagattccaggccgg

SEQ ID NO: 18268 - RNA, 22 nt, synthetic construct
  source 1..22: mol_type = other RNA
aaaatacagattccaggccggg

SEQ ID NO: 18269 - RNA, 22 nt, synthetic construct
  source 1..22: mol_type = other RNA
caggccgggcatggtggctcac

SEQ ID NO: 18270 - RNA, 22 nt, synthetic construct
  source 1..22: mol_type = other RNA
ggaggctgaggccggtggatca

SEQ ID NO: 18271 - RNA, 22 nt, synthetic construct
  source 1..22: mol_type = other RNA
gagaccagcctgggcaacatgg

SEQ ID NO: 18272 - RNA, 22 nt, synthetic construct
  source 1..22: mol_type = other RNA
gccgggtgtagtggtgcatgcc

SEQ ID NO: 18273 - RNA, 22 nt, synthetic construct
  source 1..22: mol_type = other RNA
cggtgagccgagatcacaccat

SEQ ID NO: 18274 - RNA, 22 nt, synthetic construct
  source 1..22: mol_type = other RNA
cactccagcctgggcaacaaga

SEQ ID NO: 18275 - RNA, 22 nt, synthetic construct
  source 1..22: mol_type = other RNA
ctgggcccggctgcagactccc

SEQ ID NO: 18276 - RNA, 22 nt, synthetic construct
  source 1..22: mol_type = other RNA
ttaacacccttcccaggtaatt

SEQ ID NO: 18277 - RNA, 22 nt, synthetic construct
  source 1..22: mol_type = other RNA
taacacccttcccaggtaattc

SEQ ID NO: 18278 - RNA, 22 nt, synthetic construct
  source 1..22: mol_type = other RNA
aacacccttcccaggtaattct

SEQ ID NO: 18279 - RNA, 22 nt, synthetic construct
  source 1..22: mol_type = other RNA
acacccttcccaggtaattctc

SEQ ID NO: 18280 - RNA, 22 nt, synthetic construct
  source 1..22: mol_type = other RNA
tcactcacagccaagcctgccg

SEQ ID NO: 18281 - RNA, 22 nt, synthetic construct
  source 1..22: mol_type = other RNA
atcttggggtctccagcaccca

SEQ ID NO: 18282 - RNA, 22 nt, synthetic construct
  source 1..22: mol_type = other RNA
agtagagccggatgggtcagga

SEQ ID NO: 18283 - RNA, 22 nt, synthetic construct
  source 1..22: mol_type = other RNA
ctaactgcagtcacaagatcct

SEQ ID NO: 18284 - RNA, 22 nt, synthetic construct
  source 1..22: mol_type = other RNA
ccttccaggaaaaacttgttgg

SEQ ID NO: 18285 - RNA, 22 nt, synthetic construct
  source 1..22: mol_type = other RNA
gactcctttccaggtcattgac

SEQ ID NO: 18286 - RNA, 22 nt, synthetic construct
  source 1..22: mol_type = other RNA
caggtcattgactgcagttagg

SEQ ID NO: 18287 - RNA, 22 nt, synthetic construct
  source 1..22: mol_type = other RNA
actgcagttaggagtggcatgc

SEQ ID NO: 18288 - RNA, 22 nt, synthetic construct
  source 1..22: mol_type = other RNA
ggagtggcatgcagaagggagg

SEQ ID NO: 18289 - RNA, 22 nt, synthetic construct
  source 1..22: mol_type = other RNA
tggacagggaccgaaggtctcc

SEQ ID NO: 18290 - RNA, 22 nt, synthetic construct
  source 1..22: mol_type = other RNA
tcatcctgggaccaccaggccc

SEQ ID NO: 18291 - RNA, 22 nt, synthetic construct
  source 1..22: mol_type = other RNA
ccctttactggcaaatgcacaa

SEQ ID NO: 18292 - RNA, 22 nt, synthetic construct
  source 1..22: mol_type = other RNA
ctggcaaatgcacaagctggag

SEQ ID NO: 18293 - RNA, 22 nt, synthetic construct
  source 1..22: mol_type = other RNA
gagttttaagattttccaagtt

SEQ ID NO: 18294 - RNA, 22 nt, synthetic construct
  source 1..22: mol_type = other RNA
taagattttccaagttgttatg

SEQ ID NO: 18295 - RNA, 22 nt, synthetic construct
  source 1..22: mol_type = other RNA
aagattttccaagttgttatga

SEQ ID NO: 18296 - RNA, 22 nt, synthetic construct
  source 1..22: mol_type = other RNA
agattttccaagttgttatgag

SEQ ID NO: 18297 - RNA, 22 nt, synthetic construct
  source 1..22: mol_type = other RNA
tccaagttgttatgaggtcagt

SEQ ID NO: 18298 - RNA, 22 nt, synthetic construct
  source 1..22: mol_type = other RNA
ccaagttgttatgaggtcagtg

SEQ ID NO: 18299 - RNA, 22 nt, synthetic construct
  source 1..22: mol_type = other RNA
caagttgttatgaggtcagtgt

SEQ ID NO: 18300 - RNA, 22 nt, synthetic construct
  source 1..22: mol_type = other RNA
ttatgaggtcagtgtcctcaat

SEQ ID NO: 18301 - RNA, 22 nt, synthetic construct
  source 1..22: mol_type = other RNA
tgaggtcagtgtcctcaatcgg

SEQ ID NO: 18302 - RNA, 22 nt, synthetic construct
  source 1..22: mol_type = other RNA
agagggggcatctgtggtgtct

SEQ ID NO: 18303 - RNA, 22 nt, synthetic construct
  source 1..22: mol_type = other RNA
gtggggtcctgtaggatttcca

SEQ ID NO: 18304 - RNA, 22 nt, synthetic construct
  source 1..22: mol_type = other RNA
tggggtcctgtaggatttccac

SEQ ID NO: 18305 - RNA, 22 nt, synthetic construct
  source 1..22: mol_type = other RNA
ccacgtccctcttggaggaaaa

SEQ ID NO: 18306 - RNA, 22 nt, synthetic construct
  source 1..22: mol_type = other RNA
cacgtccctcttggaggaaaaa

SEQ ID NO: 18307 - RNA, 22 nt, synthetic construct
  source 1..22: mol_type = other RNA
tctcaggtcagattgtctggga

SEQ ID NO: 18308 - RNA, 22 nt, synthetic construct
  source 1..22: mol_type = other RNA
tctgggaagccaagtaggagat

SEQ ID NO: 18309 - RNA, 22 nt, synthetic construct
  source 1..22: mol_type = other RNA
gcatataggaggtttactgggg

SEQ ID NO: 18310 - RNA, 22 nt, synthetic construct
  source 1..22: mol_type = other RNA
catataggaggtttactgggga

SEQ ID NO: 18311 - RNA, 22 nt, synthetic construct
  source 1..22: mol_type = other RNA
actggggacattcacaggaggg

SEQ ID NO: 18312 - RNA, 22 nt, synthetic construct
  source 1..22: mol_type = other RNA
ctggggacattcacaggaggga

SEQ ID NO: 18313 - RNA, 22 nt, synthetic construct
  source 1..22: mol_type = other RNA
acaggagggaacacccgaagga

SEQ ID NO: 18314 - RNA, 22 nt, synthetic construct
  source 1..22: mol_type = other RNA
ggaagcagcaggagttgaggtg

SEQ ID NO: 18315 - RNA, 22 nt, synthetic construct
  source 1..22: mol_type = other RNA
aggtgcaatgcagtcacaacag

SEQ ID NO: 18316 - RNA, 22 nt, synthetic construct
  source 1..22: mol_type = other RNA
gttataatcaatgaacctacat

SEQ ID NO: 18317 - RNA, 22 nt, synthetic construct
  source 1..22: mol_type = other RNA
ttataatcaatgaacctacatt

SEQ ID NO: 18318 - RNA, 22 nt, synthetic construct
  source 1..22: mol_type = other RNA
taatcaatgaacctacattgat

SEQ ID NO: 18319 - RNA, 22 nt, synthetic construct
  source 1..22: mol_type = other RNA
atgcatcattattacccaaggt

SEQ ID NO: 18320 - RNA, 22 nt, synthetic construct
  source 1..22: mol_type = other RNA
ttacccaaggtccatggtttgt

SEQ ID NO: 18321 - RNA, 22 nt, synthetic construct
  source 1..22: mol_type = other RNA
cccaaggtccatggtttgttta

SEQ ID NO: 18322 - RNA, 22 nt, synthetic construct
  source 1..22: mol_type = other RNA
gtttacatgagggtttactctt

SEQ ID NO: 18323 - RNA, 22 nt, synthetic construct
  source 1..22: mol_type = other RNA
tttacatgagggtttactcttg

SEQ ID NO: 18324 - RNA, 22 nt, synthetic construct
  source 1..22: mol_type = other RNA
acatgagggtttactcttggtg

SEQ ID NO: 18325 - RNA, 22 nt, synthetic construct
  source 1..22: mol_type = other RNA
catgagggtttactcttggtgt

SEQ ID NO: 18326 - RNA, 22 nt, synthetic construct
  source 1..22: mol_type = other RNA
actcttggtgttgtacattctg

SEQ ID NO: 18327 - RNA, 22 nt, synthetic construct
  source 1..22: mol_type = other RNA
ctcttggtgttgtacattctgt

SEQ ID NO: 18328 - RNA, 22 nt, synthetic construct
  source 1..22: mol_type = other RNA
tacattctgtgggtttggacag

SEQ ID NO: 18329 - RNA, 22 nt, synthetic construct
  source 1..22: mol_type = other RNA
tgtgggtttggacagatacatg

SEQ ID NO: 18330 - RNA, 22 nt, synthetic construct
  source 1..22: mol_type = other RNA
ggacagatacatgatgtaatgt

SEQ ID NO: 18331 - RNA, 22 nt, synthetic construct
  source 1..22: mol_type = other RNA
gacagatacatgatgtaatgta

SEQ ID NO: 18332 - RNA, 22 nt, synthetic construct
  source 1..22: mol_type = other RNA
tagtatcacacagactcatttc

SEQ ID NO: 18333 - RNA, 22 nt, synthetic construct
  source 1..22: mol_type = other RNA
cacttgtgactgagcttgtcct

SEQ ID NO: 18334 - RNA, 22 nt, synthetic construct
  source 1..22: mol_type = other RNA
acttgtgactgagcttgtcctt

SEQ ID NO: 18335 - RNA, 22 nt, synthetic construct
  source 1..22: mol_type = other RNA
tttaacctgcctccaactgctg

SEQ ID NO: 18336 - RNA, 22 nt, synthetic construct
  source 1..22: mol_type = other RNA
acctgcctccaactgctgagaa

SEQ ID NO: 18337 - RNA, 22 nt, synthetic construct
  source 1..22: mol_type = other RNA
gctagggattgcagccaatttt

SEQ ID NO: 18338 - RNA, 22 nt, synthetic construct
  source 1..22: mol_type = other RNA
cagccaattttaatttgttttc

SEQ ID NO: 18339 - RNA, 22 nt, synthetic construct
  source 1..22: mol_type = other RNA
taatttgttttccactttcctg

SEQ ID NO: 18340 - RNA, 22 nt, synthetic construct
  source 1..22: mol_type = other RNA
aatttgttttccactttcctgc

SEQ ID NO: 18341 - RNA, 22 nt, synthetic construct
  source 1..22: mol_type = other RNA
atttgttttccactttcctgct

SEQ ID NO: 18342 - RNA, 22 nt, synthetic construct
  source 1..22: mol_type = other RNA
gttttccactttcctgctctga

SEQ ID NO: 18343 - RNA, 22 nt, synthetic construct
  source 1..22: mol_type = other RNA
ttttccactttcctgctctgaa

SEQ ID NO: 18344 - RNA, 22 nt, synthetic construct
  source 1..22: mol_type = other RNA
tccactttcctgctctgaagtt

SEQ ID NO: 18345 - RNA, 22 nt, synthetic construct
  source 1..22: mol_type = other RNA
ccactttcctgctctgaagtta

SEQ ID NO: 18346 - RNA, 22 nt, synthetic construct
  source 1..22: mol_type = other RNA
cactttcctgctctgaagttac

SEQ ID NO: 18347 - RNA, 22 nt, synthetic construct
  source 1..22: mol_type = other RNA
ctgctctgaagttactttgttt

SEQ ID NO: 18348 - RNA, 22 nt, synthetic construct
  source 1..22: mol_type = other RNA
ctttgtttgccagaggctggtt

SEQ ID NO: 18349 - RNA, 22 nt, synthetic construct
  source 1..22: mol_type = other RNA
tttgccagaggctggttggttc

SEQ ID NO: 18350 - RNA, 22 nt, synthetic construct
  source 1..22: mol_type = other RNA
gccagaggctggttggttcaaa

SEQ ID NO: 18351 - RNA, 22 nt, synthetic construct
  source 1..22: mol_type = other RNA
ccagaggctggttggttcaaac

SEQ ID NO: 18352 - RNA, 22 nt, synthetic construct
  source 1..22: mol_type = other RNA
gttcaaacccaaagggcaggga

SEQ ID NO: 18353 - RNA, 22 nt, synthetic construct
  source 1..22: mol_type = other RNA
aaacccaaagggcagggagctg

SEQ ID NO: 18354 - RNA, 22 nt, synthetic construct
  source 1..22: mol_type = other RNA
aacggtgctggaattgggatgg

SEQ ID NO: 18355 - RNA, 22 nt, synthetic construct
  source 1..22: mol_type = other RNA
ggatggcaaaaaggagcagcag

SEQ ID NO: 18356 - RNA, 22 nt, synthetic construct
  source 1..22: mol_type = other RNA
catcccacagttcccagggagc

SEQ ID NO: 18357 - RNA, 22 nt, synthetic construct
  source 1..22: mol_type = other RNA
ccagggagcttaccattctttc

SEQ ID NO: 18358 - RNA, 22 nt, synthetic construct
  source 1..22: mol_type = other RNA
tttcattcattcattcatcctt

SEQ ID NO: 18359 - RNA, 22 nt, synthetic construct
  source 1..22: mol_type = other RNA
attcattcattcatcctttcat

SEQ ID NO: 18360 - RNA, 22 nt, synthetic construct
  source 1..22: mol_type = other RNA
attcattcatcctttcatttat

SEQ ID NO: 18361 - RNA, 22 nt, synthetic construct
  source 1..22: mol_type = other RNA
attcatcctttcatttatgaga

SEQ ID NO: 18362 - RNA, 22 nt, synthetic construct
  source 1..22: mol_type = other RNA
atcctttcatttatgagacaaa

SEQ ID NO: 18363 - RNA, 22 nt, synthetic construct
  source 1..22: mol_type = other RNA
atttatgagacaaagtctcact

SEQ ID NO: 18364 - RNA, 22 nt, synthetic construct
  source 1..22: mol_type = other RNA
atgagacaaagtctcactctgt

SEQ ID NO: 18365 - RNA, 22 nt, synthetic construct
  source 1..22: mol_type = other RNA
tgagacaaagtctcactctgtt

SEQ ID NO: 18366 - RNA, 22 nt, synthetic construct
  source 1..22: mol_type = other RNA
cccaggttggagtgcagtggca

SEQ ID NO: 18367 - RNA, 22 nt, synthetic construct
  source 1..22: mol_type = other RNA
gagtgcagtggcacagtcattg

SEQ ID NO: 18368 - RNA, 22 nt, synthetic construct
  source 1..22: mol_type = other RNA
ctcactgcagcctcaagctcct

SEQ ID NO: 18369 - RNA, 22 nt, synthetic construct
  source 1..22: mol_type = other RNA
ttgtatcttttatttctgaaga

SEQ ID NO: 18370 - RNA, 22 nt, synthetic construct
  source 1..22: mol_type = other RNA
tgtatcttttatttctgaagag

SEQ ID NO: 18371 - RNA, 22 nt, synthetic construct
  source 1..22: mol_type = other RNA
gtatcttttatttctgaagaga

SEQ ID NO: 18372 - RNA, 22 nt, synthetic construct
  source 1..22: mol_type = other RNA
tatcttttatttctgaagagat

SEQ ID NO: 18373 - RNA, 22 nt, synthetic construct
  source 1..22: mol_type = other RNA
atttctgaagagatggggtttc

SEQ ID NO: 18374 - RNA, 22 nt, synthetic construct
  source 1..22: mol_type = other RNA
tttctgaagagatggggtttca

SEQ ID NO: 18375 - RNA, 22 nt, synthetic construct
  source 1..22: mol_type = other RNA
ctgaagagatggggtttcacta

SEQ ID NO: 18376 - RNA, 22 nt, synthetic construct
  source 1..22: mol_type = other RNA
tgaagagatggggtttcactat

SEQ ID NO: 18377 - RNA, 22 nt, synthetic construct
  source 1..22: mol_type = other RNA
cactatgttgcccaggctggtc

SEQ ID NO: 18378 - RNA, 22 nt, synthetic construct
  source 1..22: mol_type = other RNA
actatgttgcccaggctggtct

SEQ ID NO: 18379 - RNA, 22 nt, synthetic construct
  source 1..22: mol_type = other RNA
cccaggctggtctcaaactcct

SEQ ID NO: 18380 - RNA, 22 nt, synthetic construct
  source 1..22: mol_type = other RNA
caggtgtgatctcagacagctt

SEQ ID NO: 18381 - RNA, 22 nt, synthetic construct
  source 1..22: mol_type = other RNA
catctgagctggcagcagagct

SEQ ID NO: 18382 - RNA, 22 nt, synthetic construct
  source 1..22: mol_type = other RNA
gtgcttcctgctccttctctgt

SEQ ID NO: 18383 - RNA, 22 nt, synthetic construct
  source 1..22: mol_type = other RNA
gggtacccagggccagtcccct

SEQ ID NO: 18384 - RNA, 22 nt, synthetic construct
  source 1..22: mol_type = other RNA
ggtacccagggccagtcccctc

SEQ ID NO: 18385 - RNA, 22 nt, synthetic construct
  source 1..22: mol_type = other RNA
cattgcaggacaggacataatt

SEQ ID NO: 18386 - RNA, 22 nt, synthetic construct
  source 1..22: mol_type = other RNA
caggacaggacataattgaatc

SEQ ID NO: 18387 - RNA, 22 nt, synthetic construct
  source 1..22: mol_type = other RNA
aatcctgcctctccctgcccca

SEQ ID NO: 18388 - RNA, 22 nt, synthetic construct
  source 1..22: mol_type = other RNA
tcttgggacctgcaagggcctc

SEQ ID NO: 18389 - RNA, 22 nt, synthetic construct
  source 1..22: mol_type = other RNA
tgtgtactctatatagagacat

SEQ ID NO: 18390 - RNA, 22 nt, synthetic construct
  source 1..22: mol_type = other RNA
tgatggtgatttagacacacac

SEQ ID NO: 18391 - RNA, 22 nt, synthetic construct
  source 1..22: mol_type = other RNA
agacacacacacacttatattg

SEQ ID NO: 18392 - RNA, 22 nt, synthetic construct
  source 1..22: mol_type = other RNA
gacacacacacacttatattgg

SEQ ID NO: 18393 - RNA, 22 nt, synthetic construct
  source 1..22: mol_type = other RNA
gcttgggaaacaaaacaaatag

SEQ ID NO: 18394 - RNA, 22 nt, synthetic construct
  source 1..22: mol_type = other RNA
aacttttgattttgcagccaag

SEQ ID NO: 18395 - RNA, 22 nt, synthetic construct
  source 1..22: mol_type = other RNA
gattttgcagccaagcccctgt

SEQ ID NO: 18396 - RNA, 22 nt, synthetic construct
  source 1..22: mol_type = other RNA
attttgcagccaagcccctgtg

SEQ ID NO: 18397 - RNA, 22 nt, synthetic construct
  source 1..22: mol_type = other RNA
tgcagccaagcccctgtggcac

SEQ ID NO: 18398 - RNA, 22 nt, synthetic construct
  source 1..22: mol_type = other RNA
gcagccaagcccctgtggcaca

SEQ ID NO: 18399 - RNA, 22 nt, synthetic construct
  source 1..22: mol_type = other RNA
cagccaagcccctgtggcacag

SEQ ID NO: 18400 - RNA, 22 nt, synthetic construct
  source 1..22: mol_type = other RNA
agagccaaccaatagcaatatc

SEQ ID NO: 18401 - RNA, 22 nt, synthetic construct
  source 1..22: mol_type = other RNA
gagccaaccaatagcaatatct

SEQ ID NO: 18402 - RNA, 22 nt, synthetic construct
  source 1..22: mol_type = other RNA
cacacatacacatgcacacaca

SEQ ID NO: 18403 - RNA, 22 nt, synthetic construct
  source 1..22: mol_type = other RNA
cagtgttgctacatgccttagt

SEQ ID NO: 18404 - RNA, 22 nt, synthetic construct
  source 1..22: mol_type = other RNA
ctacatgccttagtttcctctc

SEQ ID NO: 18405 - RNA, 22 nt, synthetic construct
  source 1..22: mol_type = other RNA
cctctccgtctcctgtgacctc

SEQ ID NO: 18406 - RNA, 22 nt, synthetic construct
  source 1..22: mol_type = other RNA
ctctccgtctcctgtgacctcc

SEQ ID NO: 18407 - RNA, 22 nt, synthetic construct
  source 1..22: mol_type = other RNA
ctcttaagtcctctctctgtct

SEQ ID NO: 18408 - RNA, 22 nt, synthetic construct
  source 1..22: mol_type = other RNA
tcttaagtcctctctctgtctc

SEQ ID NO: 18409 - RNA, 22 nt, synthetic construct
  source 1..22: mol_type = other RNA
tcctgggatatctacacttggt

SEQ ID NO: 18410 - RNA, 22 nt, synthetic construct
  source 1..22: mol_type = other RNA
gcaaacagcaggctggagagtg

SEQ ID NO: 18411 - RNA, 22 nt, synthetic construct
  source 1..22: mol_type = other RNA
caaacagcaggctggagagtga

SEQ ID NO: 18412 - RNA, 22 nt, synthetic construct
  source 1..22: mol_type = other RNA
ctatctcttccccaggaccctg

SEQ ID NO: 18413 - RNA, 22 nt, synthetic construct
  source 1..22: mol_type = other RNA
gtttctttgtgaacatctatag

SEQ ID NO: 18414 - RNA, 22 nt, synthetic construct
  source 1..22: mol_type = other RNA
tttctttgtgaacatctatagg

SEQ ID NO: 18415 - RNA, 22 nt, synthetic construct
  source 1..22: mol_type = other RNA
ctttgtgaacatctataggtac

SEQ ID NO: 18416 - RNA, 22 nt, synthetic construct
  source 1..22: mol_type = other RNA
tttgtgaacatctataggtacc

SEQ ID NO: 18417 - RNA, 22 nt, synthetic construct
  source 1..22: mol_type = other RNA
tgaacatctataggtaccaggc

SEQ ID NO: 18418 - RNA, 22 nt, synthetic construct
  source 1..22: mol_type = other RNA
ttggtgagccatagaggtacca

SEQ ID NO: 18419 - RNA, 22 nt, synthetic construct
  source 1..22: mol_type = other RNA
gtgagccatagaggtaccaacc

SEQ ID NO: 18420 - RNA, 22 nt, synthetic construct
  source 1..22: mol_type = other RNA
tttcttttcttttcaacccctg

SEQ ID NO: 18421 - RNA, 22 nt, synthetic construct
  source 1..22: mol_type = other RNA
cttttcttttcaacccctgggc

SEQ ID NO: 18422 - RNA, 22 nt, synthetic construct
  source 1..22: mol_type = other RNA
ttttcttttcaacccctgggcc

SEQ ID NO: 18423 - RNA, 22 nt, synthetic construct
  source 1..22: mol_type = other RNA
cttttcaacccctgggccttta

SEQ ID NO: 18424 - RNA, 22 nt, synthetic construct
  source 1..22: mol_type = other RNA
ttttcaacccctgggcctttaa

SEQ ID NO: 18425 - RNA, 22 nt, synthetic construct
  source 1..22: mol_type = other RNA
caacccctgggcctttaaacct

SEQ ID NO: 18426 - RNA, 22 nt, synthetic construct
  source 1..22: mol_type = other RNA
aacccctgggcctttaaacctt

SEQ ID NO: 18427 - RNA, 22 nt, synthetic construct
  source 1..22: mol_type = other RNA
aaccttcgattaactgcccagt

SEQ ID NO: 18428 - RNA, 22 nt, synthetic construct
  source 1..22: mol_type = other RNA
actgcccagtgcagcccaggtc

SEQ ID NO: 18429 - RNA, 22 nt, synthetic construct
  source 1..22: mol_type = other RNA
gttcacatgagggttttctctt

SEQ ID NO: 18430 - RNA, 22 nt, synthetic construct
  source 1..22: mol_type = other RNA
acatgagggttttctcttcatt

SEQ ID NO: 18431 - RNA, 22 nt, synthetic construct
  source 1..22: mol_type = other RNA
tctcttcattaatgtccctatt

SEQ ID NO: 18432 - RNA, 22 nt, synthetic construct
  source 1..22: mol_type = other RNA
ctcttcattaatgtccctattt

SEQ ID NO: 18433 - RNA, 22 nt, synthetic construct
  source 1..22: mol_type = other RNA
tcttcattaatgtccctatttc

SEQ ID NO: 18434 - RNA, 22 nt, synthetic construct
  source 1..22: mol_type = other RNA
atgtccctatttcccatactgg

SEQ ID NO: 18435 - RNA, 22 nt, synthetic construct
  source 1..22: mol_type = other RNA
cccatactgggtgcccattcta

SEQ ID NO: 18436 - RNA, 22 nt, synthetic construct
  source 1..22: mol_type = other RNA
ccatactgggtgcccattctaa

SEQ ID NO: 18437 - RNA, 22 nt, synthetic construct
  source 1..22: mol_type = other RNA
taatgcatttcaggtgtatctt

SEQ ID NO: 18438 - RNA, 22 nt, synthetic construct
  source 1..22: mol_type = other RNA
caggtgtatctttctgtttgta

SEQ ID NO: 18439 - RNA, 22 nt, synthetic construct
  source 1..22: mol_type = other RNA
aggtgtatctttctgtttgtat

SEQ ID NO: 18440 - RNA, 22 nt, synthetic construct
  source 1..22: mol_type = other RNA
tgtttgtatgtgctcttataaa

SEQ ID NO: 18441 - RNA, 22 nt, synthetic construct
  source 1..22: mol_type = other RNA
gtatgtgctcttataaaacatg

SEQ ID NO: 18442 - RNA, 22 nt, synthetic construct
  source 1..22: mol_type = other RNA
tatgtgctcttataaaacatgt

SEQ ID NO: 18443 - RNA, 22 nt, synthetic construct
  source 1..22: mol_type = other RNA
tgccttttttttttttttttag

SEQ ID NO: 18444 - RNA, 22 nt, synthetic construct
  source 1..22: mol_type = other RNA
gccttttttttttttttttaga

SEQ ID NO: 18445 - RNA, 22 nt, synthetic construct
  source 1..22: mol_type = other RNA
ccttttttttttttttttagat

SEQ ID NO: 18446 - RNA, 22 nt, synthetic construct
  source 1..22: mol_type = other RNA
ttttttttttttagatggagtc

SEQ ID NO: 18447 - RNA, 22 nt, synthetic construct
  source 1..22: mol_type = other RNA
tttttttttttagatggagtct

SEQ ID NO: 18448 - RNA, 22 nt, synthetic construct
  source 1..22: mol_type = other RNA
ttttttttttagatggagtctc

SEQ ID NO: 18449 - RNA, 22 nt, synthetic construct
  source 1..22: mol_type = other RNA
tttttttttagatggagtctca

SEQ ID NO: 18450 - RNA, 22 nt, synthetic construct
  source 1..22: mol_type = other RNA
ttttttttagatggagtctcac

SEQ ID NO: 18451 - RNA, 22 nt, synthetic construct
  source 1..22: mol_type = other RNA
tttttttagatggagtctcact

SEQ ID NO: 18452 - RNA, 22 nt, synthetic construct
  source 1..22: mol_type = other RNA
ttttttagatggagtctcactc

SEQ ID NO: 18453 - RNA, 22 nt, synthetic construct
  source 1..22: mol_type = other RNA
tttttagatggagtctcactct

SEQ ID NO: 18454 - RNA, 22 nt, synthetic construct
  source 1..22: mol_type = other RNA
ttttagatggagtctcactctg

SEQ ID NO: 18455 - RNA, 22 nt, synthetic construct
  source 1..22: mol_type = other RNA
tttagatggagtctcactctgt

SEQ ID NO: 18456 - RNA, 22 nt, synthetic construct
  source 1..22: mol_type = other RNA
ttagatggagtctcactctgtc

SEQ ID NO: 18457 - RNA, 22 nt, synthetic construct
  source 1..22: mol_type = other RNA
tagatggagtctcactctgtca

SEQ ID NO: 18458 - RNA, 22 nt, synthetic construct
  source 1..22: mol_type = other RNA
agatggagtctcactctgtcac

SEQ ID NO: 18459 - RNA, 22 nt, synthetic construct
  source 1..22: mol_type = other RNA
gatggagtctcactctgtcacc

SEQ ID NO: 18460 - RNA, 22 nt, synthetic construct
  source 1..22: mol_type = other RNA
tctatttttagtagagatgggg

SEQ ID NO: 18461 - RNA, 22 nt, synthetic construct
  source 1..22: mol_type = other RNA
ctatttttagtagagatggggt

SEQ ID NO: 18462 - RNA, 22 nt, synthetic construct
  source 1..22: mol_type = other RNA
tatttttagtagagatggggtt

SEQ ID NO: 18463 - RNA, 22 nt, synthetic construct
  source 1..22: mol_type = other RNA
ttagtagagatggggttttacc

SEQ ID NO: 18464 - RNA, 22 nt, synthetic construct
  source 1..22: mol_type = other RNA
tagtagagatggggttttacca

SEQ ID NO: 18465 - RNA, 22 nt, synthetic construct
  source 1..22: mol_type = other RNA
agtagagatggggttttaccac

SEQ ID NO: 18466 - RNA, 22 nt, synthetic construct
  source 1..22: mol_type = other RNA
gtagagatggggttttaccacc

SEQ ID NO: 18467 - RNA, 22 nt, synthetic construct
  source 1..22: mol_type = other RNA
taccaccttggccaggctggtc

SEQ ID NO: 18468 - RNA, 22 nt, synthetic construct
  source 1..22: mol_type = other RNA
accaccttggccaggctggtct

SEQ ID NO: 18469 - RNA, 22 nt, synthetic construct
  source 1..22: mol_type = other RNA
ccaccttggccaggctggtctc

SEQ ID NO: 18470 - RNA, 22 nt, synthetic construct
  source 1..22: mol_type = other RNA
caggtgcgagtcaccacgcctg

SEQ ID NO: 18471 - RNA, 22 nt, synthetic construct
  source 1..22: mol_type = other RNA
cttacttttgcattctgtacta

SEQ ID NO: 18472 - RNA, 22 nt, synthetic construct
  source 1..22: mol_type = other RNA
ttacttttgcattctgtactat

SEQ ID NO: 18473 - RNA, 22 nt, synthetic construct
  source 1..22: mol_type = other RNA
gcattctgtactatgtttttag

SEQ ID NO: 18474 - RNA, 22 nt, synthetic construct
  source 1..22: mol_type = other RNA
cattctgtactatgtttttagg

SEQ ID NO: 18475 - RNA, 22 nt, synthetic construct
  source 1..22: mol_type = other RNA
tgtactatgtttttaggatcta

SEQ ID NO: 18476 - RNA, 22 nt, synthetic construct
  source 1..22: mol_type = other RNA
ttaggatctacttgccttgctt

SEQ ID NO: 18477 - RNA, 22 nt, synthetic construct
  source 1..22: mol_type = other RNA
taggatctacttgccttgcttc

SEQ ID NO: 18478 - RNA, 22 nt, synthetic construct
  source 1..22: mol_type = other RNA
aggatctacttgccttgcttct

SEQ ID NO: 18479 - RNA, 22 nt, synthetic construct
  source 1..22: mol_type = other RNA
ggatctacttgccttgcttctg

SEQ ID NO: 18480 - RNA, 22 nt, synthetic construct
  source 1..22: mol_type = other RNA
gatctttgcttctaatcacgga

SEQ ID NO: 18481 - RNA, 22 nt, synthetic construct
  source 1..22: mol_type = other RNA
atctttgcttctaatcacggac

SEQ ID NO: 18482 - RNA, 22 nt, synthetic construct
  source 1..22: mol_type = other RNA
cttctaatcacggacattgttc

SEQ ID NO: 18483 - RNA, 22 nt, synthetic construct
  source 1..22: mol_type = other RNA
ttctctatggagtgcaggggtt

SEQ ID NO: 18484 - RNA, 22 nt, synthetic construct
  source 1..22: mol_type = other RNA
tctatggagtgcaggggttact

SEQ ID NO: 18485 - RNA, 22 nt, synthetic construct
  source 1..22: mol_type = other RNA
cttttcacctgtccacaccccc

SEQ ID NO: 18486 - RNA, 22 nt, synthetic construct
  source 1..22: mol_type = other RNA
cacctgtccacacccccagtga

SEQ ID NO: 18487 - RNA, 22 nt, synthetic construct
  source 1..22: mol_type = other RNA
acctgtccacacccccagtgat

SEQ ID NO: 18488 - RNA, 22 nt, synthetic construct
  source 1..22: mol_type = other RNA
tcctggggagttgtgggaacat

SEQ ID NO: 18489 - RNA, 22 nt, synthetic construct
  source 1..22: mol_type = other RNA
tgggaacatttcttcaggatat

SEQ ID NO: 18490 - RNA, 22 nt, synthetic construct
  source 1..22: mol_type = other RNA
cttcaggatatatagacccaag

SEQ ID NO: 18491 - RNA, 22 nt, synthetic construct
  source 1..22: mol_type = other RNA
ttcaggatatatagacccaaga

SEQ ID NO: 18492 - RNA, 22 nt, synthetic construct
  source 1..22: mol_type = other RNA
ccaggtggtaggatctacatat

SEQ ID NO: 18493 - RNA, 22 nt, synthetic construct
  source 1..22: mol_type = other RNA
tacatgatgccaggtcgttctc

SEQ ID NO: 18494 - RNA, 22 nt, synthetic construct
  source 1..22: mol_type = other RNA
tccagagcggccccatccatct

SEQ ID NO: 18495 - RNA, 22 nt, synthetic construct
  source 1..22: mol_type = other RNA
ccacaaacccgtgtaaccaaca

SEQ ID NO: 18496 - RNA, 22 nt, synthetic construct
  source 1..22: mol_type = other RNA
cccagatgtctaacttttgcca

SEQ ID NO: 18497 - RNA, 22 nt, synthetic construct
  source 1..22: mol_type = other RNA
ccagatgtctaacttttgccag

SEQ ID NO: 18498 - RNA, 22 nt, synthetic construct
  source 1..22: mol_type = other RNA
gccagttgtacagtatcaagtg

SEQ ID NO: 18499 - RNA, 22 nt, synthetic construct
  source 1..22: mol_type = other RNA
ccagttgtacagtatcaagtgt

SEQ ID NO: 18500 - RNA, 22 nt, synthetic construct
  source 1..22: mol_type = other RNA
tacagtatcaagtgtcactttg

SEQ ID NO: 18501 - RNA, 22 nt, synthetic construct
  source 1..22: mol_type = other RNA
ctgttttatttttggagtttac

SEQ ID NO: 18502 - RNA, 22 nt, synthetic construct
  source 1..22: mol_type = other RNA
tatttttggagtttacatctta

SEQ ID NO: 18503 - RNA, 22 nt, synthetic construct
  source 1..22: mol_type = other RNA
atttttggagtttacatcttag

SEQ ID NO: 18504 - RNA, 22 nt, synthetic construct
  source 1..22: mol_type = other RNA
tttttggagtttacatcttagt

SEQ ID NO: 18505 - RNA, 22 nt, synthetic construct
  source 1..22: mol_type = other RNA
ttggagtttacatcttagtacc

SEQ ID NO: 18506 - RNA, 22 nt, synthetic construct
  source 1..22: mol_type = other RNA
tggagtttacatcttagtacca

SEQ ID NO: 18507 - RNA, 22 nt, synthetic construct
  source 1..22: mol_type = other RNA
ggagtttacatcttagtaccac

SEQ ID NO: 18508 - RNA, 22 nt, synthetic construct
  source 1..22: mol_type = other RNA
gagtttacatcttagtaccact

SEQ ID NO: 18509 - RNA, 22 nt, synthetic construct
  source 1..22: mol_type = other RNA
acatcttagtaccacttactcg

SEQ ID NO: 18510 - RNA, 22 nt, synthetic construct
  source 1..22: mol_type = other RNA
catcttagtaccacttactcgc

SEQ ID NO: 18511 - RNA, 22 nt, synthetic construct
  source 1..22: mol_type = other RNA
ggtaagtcacaacaacccagtg

SEQ ID NO: 18512 - RNA, 22 nt, synthetic construct
  source 1..22: mol_type = other RNA
tgtgactcagagaggttgagta

SEQ ID NO: 18513 - RNA, 22 nt, synthetic construct
  source 1..22: mol_type = other RNA
agtaacatttgcaaagtcacac

SEQ ID NO: 18514 - RNA, 22 nt, synthetic construct
  source 1..22: mol_type = other RNA
gcaaagtcacacagcaagtgtg

SEQ ID NO: 18515 - RNA, 22 nt, synthetic construct
  source 1..22: mol_type = other RNA
caaagtcacacagcaagtgtgg

SEQ ID NO: 18516 - RNA, 22 nt, synthetic construct
  source 1..22: mol_type = other RNA
gaacccagagcctgcaccctta

SEQ ID NO: 18517 - RNA, 22 nt, synthetic construct
  source 1..22: mol_type = other RNA
aacccagagcctgcacccttaa

SEQ ID NO: 18518 - RNA, 22 nt, synthetic construct
  source 1..22: mol_type = other RNA
ttatgttttgtctctctcctaa

SEQ ID NO: 18519 - RNA, 22 nt, synthetic construct
  source 1..22: mol_type = other RNA
tgttttgtctctctcctaaaat

SEQ ID NO: 18520 - RNA, 22 nt, synthetic construct
  source 1..22: mol_type = other RNA
tgtctctctcctaaaatatcat

SEQ ID NO: 18521 - RNA, 22 nt, synthetic construct
  source 1..22: mol_type = other RNA
gtctctctcctaaaatatcatc

SEQ ID NO: 18522 - RNA, 22 nt, synthetic construct
  source 1..22: mol_type = other RNA
tctctctcctaaaatatcatct

SEQ ID NO: 18523 - RNA, 22 nt, synthetic construct
  source 1..22: mol_type = other RNA
caagcctctttggcagggactg

SEQ ID NO: 18524 - RNA, 22 nt, synthetic construct
  source 1..22: mol_type = other RNA
gcagggactgtgtggtaaacct

SEQ ID NO: 18525 - RNA, 22 nt, synthetic construct
  source 1..22: mol_type = other RNA
gggccagtaaggaactgagctc

SEQ ID NO: 18526 - RNA, 22 nt, synthetic construct
  source 1..22: mol_type = other RNA
ttacggggtgctcagtgaatca

SEQ ID NO: 18527 - RNA, 22 nt, synthetic construct
  source 1..22: mol_type = other RNA
ttttacagctttagaggggaaa

SEQ ID NO: 18528 - RNA, 22 nt, synthetic construct
  source 1..22: mol_type = other RNA
tacagctttagaggggaaaagt

SEQ ID NO: 18529 - RNA, 22 nt, synthetic construct
  source 1..22: mol_type = other RNA
acagctttagaggggaaaagtg

SEQ ID NO: 18530 - RNA, 22 nt, synthetic construct
  source 1..22: mol_type = other RNA
cagctttagaggggaaaagtga

SEQ ID NO: 18531 - RNA, 22 nt, synthetic construct
  source 1..22: mol_type = other RNA
gaggggaaaagtgagagatgtt

SEQ ID NO: 18532 - RNA, 22 nt, synthetic construct
  source 1..22: mol_type = other RNA
cttagagtttatctggaggact

SEQ ID NO: 18533 - RNA, 22 nt, synthetic construct
  source 1..22: mol_type = other RNA
ttagagtttatctggaggacta

SEQ ID NO: 18534 - RNA, 22 nt, synthetic construct
  source 1..22: mol_type = other RNA
atctggaggactacagggtgca

SEQ ID NO: 18535 - RNA, 22 nt, synthetic construct
  source 1..22: mol_type = other RNA
tctggaggactacagggtgcat

SEQ ID NO: 18536 - RNA, 22 nt, synthetic construct
  source 1..22: mol_type = other RNA
gagctactacccccacaaagaa

SEQ ID NO: 18537 - RNA, 22 nt, synthetic construct
  source 1..22: mol_type = other RNA
agctactacccccacaaagaag

SEQ ID NO: 18538 - RNA, 22 nt, synthetic construct
  source 1..22: mol_type = other RNA
ggggtctggtcatggtagatag

SEQ ID NO: 18539 - RNA, 22 nt, synthetic construct
  source 1..22: mol_type = other RNA
gggtctggtcatggtagatagg

SEQ ID NO: 18540 - RNA, 22 nt, synthetic construct
  source 1..22: mol_type = other RNA
ctaggcccctggcttcccaaca

SEQ ID NO: 18541 - RNA, 22 nt, synthetic construct
  source 1..22: mol_type = other RNA
ggcccccggaagcagcttgtca

SEQ ID NO: 18542 - RNA, 22 nt, synthetic construct
  source 1..22: mol_type = other RNA
gcccccggaagcagcttgtcat

SEQ ID NO: 18543 - RNA, 22 nt, synthetic construct
  source 1..22: mol_type = other RNA
gggagcaggttggtgttggggg

SEQ ID NO: 18544 - RNA, 22 nt, synthetic construct
  source 1..22: mol_type = other RNA
gtgttggggggggccttggggg

SEQ ID NO: 18545 - RNA, 22 nt, synthetic construct
  source 1..22: mol_type = other RNA
gggggggccttgggggaaagga

SEQ ID NO: 18546 - RNA, 22 nt, synthetic construct
  source 1..22: mol_type = other RNA
aaggggctccaacactcgttga

SEQ ID NO: 18547 - RNA, 22 nt, synthetic construct
  source 1..22: mol_type = other RNA
aaacggaggctcagagggctaa

SEQ ID NO: 18548 - RNA, 22 nt, synthetic construct
  source 1..22: mol_type = other RNA
agaggtcttcccattattcctc

SEQ ID NO: 18549 - RNA, 22 nt, synthetic construct
  source 1..22: mol_type = other RNA
ttcctcaggaggagaagttcat

SEQ ID NO: 18550 - RNA, 22 nt, synthetic construct
  source 1..22: mol_type = other RNA
ctcaggaggagaagttcatggt

SEQ ID NO: 18551 - RNA, 22 nt, synthetic construct
  source 1..22: mol_type = other RNA
atggtcaagagtagggaagtat

SEQ ID NO: 18552 - RNA, 22 nt, synthetic construct
  source 1..22: mol_type = other RNA
cttctcaagctttttttttttt

SEQ ID NO: 18553 - RNA, 22 nt, synthetic construct
  source 1..22: mol_type = other RNA
tttttttttgtctgagacagag

SEQ ID NO: 18554 - RNA, 22 nt, synthetic construct
  source 1..22: mol_type = other RNA
ttttttttgtctgagacagagt

SEQ ID NO: 18555 - RNA, 22 nt, synthetic construct
  source 1..22: mol_type = other RNA
tttttttgtctgagacagagtc

SEQ ID NO: 18556 - RNA, 22 nt, synthetic construct
  source 1..22: mol_type = other RNA
ttttttgtctgagacagagtct

SEQ ID NO: 18557 - RNA, 22 nt, synthetic construct
  source 1..22: mol_type = other RNA
tttttgtctgagacagagtctt

SEQ ID NO: 18558 - RNA, 22 nt, synthetic construct
  source 1..22: mol_type = other RNA
ttttgtctgagacagagtcttg

SEQ ID NO: 18559 - RNA, 22 nt, synthetic construct
  source 1..22: mol_type = other RNA
tttgtctgagacagagtcttgc

SEQ ID NO: 18560 - RNA, 22 nt, synthetic construct
  source 1..22: mol_type = other RNA
ttgtctgagacagagtcttgct

SEQ ID NO: 18561 - RNA, 22 nt, synthetic construct
  source 1..22: mol_type = other RNA
tgtctgagacagagtcttgctc

SEQ ID NO: 18562 - RNA, 22 nt, synthetic construct
  source 1..22: mol_type = other RNA
gtctgagacagagtcttgctct

SEQ ID NO: 18563 - RNA, 22 nt, synthetic construct
  source 1..22: mol_type = other RNA
tctgagacagagtcttgctctg

SEQ ID NO: 18564 - RNA, 22 nt, synthetic construct
  source 1..22: mol_type = other RNA
aagcaattttcctgcctcagcc

SEQ ID NO: 18565 - RNA, 22 nt, synthetic construct
  source 1..22: mol_type = other RNA
tcctgcctcagcctcccaagta

SEQ ID NO: 18566 - RNA, 22 nt, synthetic construct
  source 1..22: mol_type = other RNA
cctgcctcagcctcccaagtag

SEQ ID NO: 18567 - RNA, 22 nt, synthetic construct
  source 1..22: mol_type = other RNA
ctgcctcagcctcccaagtagc

SEQ ID NO: 18568 - RNA, 22 nt, synthetic construct
  source 1..22: mol_type = other RNA
taggcacccaccaccacgccca

SEQ ID NO: 18569 - RNA, 22 nt, synthetic construct
  source 1..22: mol_type = other RNA
ttgtatttttgcagagacgggg

SEQ ID NO: 18570 - RNA, 22 nt, synthetic construct
  source 1..22: mol_type = other RNA
tgtatttttgcagagacggggt

SEQ ID NO: 18571 - RNA, 22 nt, synthetic construct
  source 1..22: mol_type = other RNA
gtatttttgcagagacggggtt

SEQ ID NO: 18572 - RNA, 22 nt, synthetic construct
  source 1..22: mol_type = other RNA
tatttttgcagagacggggttt

SEQ ID NO: 18573 - RNA, 22 nt, synthetic construct
  source 1..22: mol_type = other RNA
ttgcagagacggggtttcacca

SEQ ID NO: 18574 - RNA, 22 nt, synthetic construct
  source 1..22: mol_type = other RNA
tgcagagacggggtttcaccat

SEQ ID NO: 18575 - RNA, 22 nt, synthetic construct
  source 1..22: mol_type = other RNA
gcagagacggggtttcaccatg

SEQ ID NO: 18576 - RNA, 22 nt, synthetic construct
  source 1..22: mol_type = other RNA
cagagacggggtttcaccatgc

SEQ ID NO: 18577 - RNA, 22 nt, synthetic construct
  source 1..22: mol_type = other RNA
caccatgctggtcaggctggtc

SEQ ID NO: 18578 - RNA, 22 nt, synthetic construct
  source 1..22: mol_type = other RNA
accatgctggtcaggctggtct

SEQ ID NO: 18579 - RNA, 22 nt, synthetic construct
  source 1..22: mol_type = other RNA
taggcgtgagccaccacccctg

SEQ ID NO: 18580 - RNA, 22 nt, synthetic construct
  source 1..22: mol_type = other RNA
atcacagttcagagcagtgctg

SEQ ID NO: 18581 - RNA, 22 nt, synthetic construct
  source 1..22: mol_type = other RNA
agagcagtgctggaggctttta

SEQ ID NO: 18582 - RNA, 22 nt, synthetic construct
  source 1..22: mol_type = other RNA
aggggtagcaaaagagccttct

SEQ ID NO: 18583 - RNA, 22 nt, synthetic construct
  source 1..22: mol_type = other RNA
ggggtagcaaaagagccttctt

SEQ ID NO: 18584 - RNA, 22 nt, synthetic construct
  source 1..22: mol_type = other RNA
agtgcctccttagaccctcaaa

SEQ ID NO: 18585 - RNA, 22 nt, synthetic construct
  source 1..22: mol_type = other RNA
ccgttaacagttgaaacagaat

SEQ ID NO: 18586 - RNA, 22 nt, synthetic construct
  source 1..22: mol_type = other RNA
acagttgaaacagaatagtaaa

SEQ ID NO: 18587 - RNA, 22 nt, synthetic construct
  source 1..22: mol_type = other RNA
aaacagaatagtaaatgcaagg

SEQ ID NO: 18588 - RNA, 22 nt, synthetic construct
  source 1..22: mol_type = other RNA
ataataaaaatggtcatcacgc

SEQ ID NO: 18589 - RNA, 22 nt, synthetic construct
  source 1..22: mol_type = other RNA
tactcaccatgcagaagttgtg

SEQ ID NO: 18590 - RNA, 22 nt, synthetic construct
  source 1..22: mol_type = other RNA
tgctgccttaagctactgttca

SEQ ID NO: 18591 - RNA, 22 nt, synthetic construct
  source 1..22: mol_type = other RNA
attgagcacttactggtcgcca

SEQ ID NO: 18592 - RNA, 22 nt, synthetic construct
  source 1..22: mol_type = other RNA
agcacttactggtcgccagtcc

SEQ ID NO: 18593 - RNA, 22 nt, synthetic construct
  source 1..22: mol_type = other RNA
taagggctccatgcaacttaac

SEQ ID NO: 18594 - RNA, 22 nt, synthetic construct
  source 1..22: mol_type = other RNA
ccaattattatcccccacttta

SEQ ID NO: 18595 - RNA, 22 nt, synthetic construct
  source 1..22: mol_type = other RNA
ttatcccccactttacagataa

SEQ ID NO: 18596 - RNA, 22 nt, synthetic construct
  source 1..22: mol_type = other RNA
tcccccactttacagataagga

SEQ ID NO: 18597 - RNA, 22 nt, synthetic construct
  source 1..22: mol_type = other RNA
cagataaggaaactgaggctcc

SEQ ID NO: 18598 - RNA, 22 nt, synthetic construct
  source 1..22: mol_type = other RNA
aaaaaatgaacttacccagatt

SEQ ID NO: 18599 - RNA, 22 nt, synthetic construct
  source 1..22: mol_type = other RNA
aaaaatgaacttacccagattg

SEQ ID NO: 18600 - RNA, 22 nt, synthetic construct
  source 1..22: mol_type = other RNA
tagtgcgttggtaggtagggat

SEQ ID NO: 18601 - RNA, 22 nt, synthetic construct
  source 1..22: mol_type = other RNA
gtaggtagggataacctgaaag

SEQ ID NO: 18602 - RNA, 22 nt, synthetic construct
  source 1..22: mol_type = other RNA
ggaaatttcaccccaaagctca

SEQ ID NO: 18603 - RNA, 22 nt, synthetic construct
  source 1..22: mol_type = other RNA
caccccaaagctcaccatctga

SEQ ID NO: 18604 - RNA, 22 nt, synthetic construct
  source 1..22: mol_type = other RNA
accccaaagctcaccatctgag

SEQ ID NO: 18605 - RNA, 22 nt, synthetic construct
  source 1..22: mol_type = other RNA
atctcccaccagctgagatgga

SEQ ID NO: 18606 - RNA, 22 nt, synthetic construct
  source 1..22: mol_type = other RNA
tgctgttcccagaagagatgca

SEQ ID NO: 18607 - RNA, 22 nt, synthetic construct
  source 1..22: mol_type = other RNA
ccagaagagatgcatgcactga

SEQ ID NO: 18608 - RNA, 22 nt, synthetic construct
  source 1..22: mol_type = other RNA
aagtctgagttagaacattgtg

SEQ ID NO: 18609 - RNA, 22 nt, synthetic construct
  source 1..22: mol_type = other RNA
agtctgagttagaacattgtgg

SEQ ID NO: 18610 - RNA, 22 nt, synthetic construct
  source 1..22: mol_type = other RNA
gaacattgtggcgacacctgat

SEQ ID NO: 18611 - RNA, 22 nt, synthetic construct
  source 1..22: mol_type = other RNA
tggcgacacctgatttccctcg

SEQ ID NO: 18612 - RNA, 22 nt, synthetic construct
  source 1..22: mol_type = other RNA
ccctcgggggagagagaggtga

SEQ ID NO: 18613 - RNA, 22 nt, synthetic construct
  source 1..22: mol_type = other RNA
cctcgggggagagagaggtgaa

SEQ ID NO: 18614 - RNA, 22 nt, synthetic construct
  source 1..22: mol_type = other RNA
ttatttcagacacctgtttagt

SEQ ID NO: 18615 - RNA, 22 nt, synthetic construct
  source 1..22: mol_type = other RNA
tttcagacacctgtttagtgtc

SEQ ID NO: 18616 - RNA, 22 nt, synthetic construct
  source 1..22: mol_type = other RNA
cagacacctgtttagtgtctac

SEQ ID NO: 18617 - RNA, 22 nt, synthetic construct
  source 1..22: mol_type = other RNA
agacacctgtttagtgtctaca

SEQ ID NO: 18618 - RNA, 22 nt, synthetic construct
  source 1..22: mol_type = other RNA
agtgtctacacttagcctttca

SEQ ID NO: 18619 - RNA, 22 nt, synthetic construct
  source 1..22: mol_type = other RNA
gtgtctacacttagcctttcaa

SEQ ID NO: 18620 - RNA, 22 nt, synthetic construct
  source 1..22: mol_type = other RNA
aaatcctgcatgcagtgtgaag

SEQ ID NO: 18621 - RNA, 22 nt, synthetic construct
  source 1..22: mol_type = other RNA
gatggcaaaaagatcaggaata

SEQ ID NO: 18622 - RNA, 22 nt, synthetic construct
  source 1..22: mol_type = other RNA
atggcaaaaagatcaggaatat

SEQ ID NO: 18623 - RNA, 22 nt, synthetic construct
  source 1..22: mol_type = other RNA
tctcgagttggatgtggaaggt

SEQ ID NO: 18624 - RNA, 22 nt, synthetic construct
  source 1..22: mol_type = other RNA
ctcgagttggatgtggaaggtg

SEQ ID NO: 18625 - RNA, 22 nt, synthetic construct
  source 1..22: mol_type = other RNA
tcgagttggatgtggaaggtgg

SEQ ID NO: 18626 - RNA, 22 nt, synthetic construct
  source 1..22: mol_type = other RNA
gatgtggaaggtggtggcccag

SEQ ID NO: 18627 - RNA, 22 nt, synthetic construct
  source 1..22: mol_type = other RNA
caaagaggaccttctaaaaata

SEQ ID NO: 18628 - RNA, 22 nt, synthetic construct
  source 1..22: mol_type = other RNA
aaagaggaccttctaaaaatac

SEQ ID NO: 18629 - RNA, 22 nt, synthetic construct
  source 1..22: mol_type = other RNA
accaaaaagacacagaccgcgc

SEQ ID NO: 18630 - RNA, 22 nt, synthetic construct
  source 1..22: mol_type = other RNA
ccaaaaagacacagaccgcgcc

SEQ ID NO: 18631 - RNA, 22 nt, synthetic construct
  source 1..22: mol_type = other RNA
tcttgccacccacgccttccct

SEQ ID NO: 18632 - RNA, 22 nt, synthetic construct
  source 1..22: mol_type = other RNA
aaaaaggctatagagtgggctg

SEQ ID NO: 18633 - RNA, 22 nt, synthetic construct
  source 1..22: mol_type = other RNA
gagatgggtagtttggttcaaa

SEQ ID NO: 18634 - RNA, 22 nt, synthetic construct
  source 1..22: mol_type = other RNA
ggttcaaatctcagcccactaa

SEQ ID NO: 18635 - RNA, 22 nt, synthetic construct
  source 1..22: mol_type = other RNA
gttcaaatctcagcccactaat

SEQ ID NO: 18636 - RNA, 22 nt, synthetic construct
  source 1..22: mol_type = other RNA
aaatctcagcccactaatccct

SEQ ID NO: 18637 - RNA, 22 nt, synthetic construct
  source 1..22: mol_type = other RNA
gaccaaatggggtaatgcctac

SEQ ID NO: 18638 - RNA, 22 nt, synthetic construct
  source 1..22: mol_type = other RNA
ggtacctggcacttgctggaca

SEQ ID NO: 18639 - RNA, 22 nt, synthetic construct
  source 1..22: mol_type = other RNA
gtacctggcacttgctggacac

SEQ ID NO: 18640 - RNA, 22 nt, synthetic construct
  source 1..22: mol_type = other RNA
tagttctatatcattgccacgg

SEQ ID NO: 18641 - RNA, 22 nt, synthetic construct
  source 1..22: mol_type = other RNA
tatatcattgccacggatgaag

SEQ ID NO: 18642 - RNA, 22 nt, synthetic construct
  source 1..22: mol_type = other RNA
ccacggatgaagagaggctgcc

SEQ ID NO: 18643 - RNA, 22 nt, synthetic construct
  source 1..22: mol_type = other RNA
ccctccatcccgctctggcaat

SEQ ID NO: 18644 - RNA, 22 nt, synthetic construct
  source 1..22: mol_type = other RNA
cctccatcccgctctggcaatg

SEQ ID NO: 18645 - RNA, 22 nt, synthetic construct
  source 1..22: mol_type = other RNA
ggagaaacagtccaatgaaggg

SEQ ID NO: 18646 - RNA, 22 nt, synthetic construct
  source 1..22: mol_type = other RNA
gagaaacagtccaatgaagggg

SEQ ID NO: 18647 - RNA, 22 nt, synthetic construct
  source 1..22: mol_type = other RNA
aagcacttcctaagcatctata

SEQ ID NO: 18648 - RNA, 22 nt, synthetic construct
  source 1..22: mol_type = other RNA
aagtagatcttggtgtgactgg

SEQ ID NO: 18649 - RNA, 22 nt, synthetic construct
  source 1..22: mol_type = other RNA
tggggaaacctagagtcttggg

SEQ ID NO: 18650 - RNA, 22 nt, synthetic construct
  source 1..22: mol_type = other RNA
cagctttgacaccctctaatgt

SEQ ID NO: 18651 - RNA, 22 nt, synthetic construct
  source 1..22: mol_type = other RNA
agctttgacaccctctaatgta

SEQ ID NO: 18652 - RNA, 22 nt, synthetic construct
  source 1..22: mol_type = other RNA
acaccctctaatgtaatgggct

SEQ ID NO: 18653 - RNA, 22 nt, synthetic construct
  source 1..22: mol_type = other RNA
actgtaggcttcccacatagct

SEQ ID NO: 18654 - RNA, 22 nt, synthetic construct
  source 1..22: mol_type = other RNA
tgttttttgttttttttttgag

SEQ ID NO: 18655 - RNA, 22 nt, synthetic construct
  source 1..22: mol_type = other RNA
gttttttgttttttttttgaga

SEQ ID NO: 18656 - RNA, 22 nt, synthetic construct
  source 1..22: mol_type = other RNA
ttttttgttttttttttgagat

SEQ ID NO: 18657 - RNA, 22 nt, synthetic construct
  source 1..22: mol_type = other RNA
tttgttttttttttgagatggt

SEQ ID NO: 18658 - RNA, 22 nt, synthetic construct
  source 1..22: mol_type = other RNA
ttgttttttttttgagatggta

SEQ ID NO: 18659 - RNA, 22 nt, synthetic construct
  source 1..22: mol_type = other RNA
tgttttttttttgagatggtat

SEQ ID NO: 18660 - RNA, 22 nt, synthetic construct
  source 1..22: mol_type = other RNA
gttttttttttgagatggtatc

SEQ ID NO: 18661 - RNA, 22 nt, synthetic construct
  source 1..22: mol_type = other RNA
ttttttttttgagatggtatct

SEQ ID NO: 18662 - RNA, 22 nt, synthetic construct
  source 1..22: mol_type = other RNA
tttttttgagatggtatctcac

SEQ ID NO: 18663 - RNA, 22 nt, synthetic construct
  source 1..22: mol_type = other RNA
ttttttgagatggtatctcact

SEQ ID NO: 18664 - RNA, 22 nt, synthetic construct
  source 1..22: mol_type = other RNA
tttttgagatggtatctcactt

SEQ ID NO: 18665 - RNA, 22 nt, synthetic construct
  source 1..22: mol_type = other RNA
ttttgagatggtatctcacttt

SEQ ID NO: 18666 - RNA, 22 nt, synthetic construct
  source 1..22: mol_type = other RNA
tttgagatggtatctcactttg

SEQ ID NO: 18667 - RNA, 22 nt, synthetic construct
  source 1..22: mol_type = other RNA
ttgagatggtatctcactttgt

SEQ ID NO: 18668 - RNA, 22 nt, synthetic construct
  source 1..22: mol_type = other RNA
tgagatggtatctcactttgtc

SEQ ID NO: 18669 - RNA, 22 nt, synthetic construct
  source 1..22: mol_type = other RNA
gagatggtatctcactttgtcg

SEQ ID NO: 18670 - RNA, 22 nt, synthetic construct
  source 1..22: mol_type = other RNA
agatggtatctcactttgtcgc

SEQ ID NO: 18671 - RNA, 22 nt, synthetic construct
  source 1..22: mol_type = other RNA
tcgcccaggctggagtgcagtg

SEQ ID NO: 18672 - RNA, 22 nt, synthetic construct
  source 1..22: mol_type = other RNA
actgcagcctctgcctcccagg

SEQ ID NO: 18673 - RNA, 22 nt, synthetic construct
  source 1..22: mol_type = other RNA
aagcgattctcctgcctcagcc

SEQ ID NO: 18674 - RNA, 22 nt, synthetic construct
  source 1..22: mol_type = other RNA
tcctgcctcagcctcccaagta

SEQ ID NO: 18675 - RNA, 22 nt, synthetic construct
  source 1..22: mol_type = other RNA
cagaagcacgccaccatgcctg

SEQ ID NO: 18676 - RNA, 22 nt, synthetic construct
  source 1..22: mol_type = other RNA
tgtatttttagtagagacggga

SEQ ID NO: 18677 - RNA, 22 nt, synthetic construct
  source 1..22: mol_type = other RNA
gtatttttagtagagacgggat

SEQ ID NO: 18678 - RNA, 22 nt, synthetic construct
  source 1..22: mol_type = other RNA
tatttttagtagagacgggatt

SEQ ID NO: 18679 - RNA, 22 nt, synthetic construct
  source 1..22: mol_type = other RNA
ttagtagagacgggatttcacc

SEQ ID NO: 18680 - RNA, 22 nt, synthetic construct
  source 1..22: mol_type = other RNA
tagtagagacgggatttcacca

SEQ ID NO: 18681 - RNA, 22 nt, synthetic construct
  source 1..22: mol_type = other RNA
agtagagacgggatttcaccat

SEQ ID NO: 18682 - RNA, 22 nt, synthetic construct
  source 1..22: mol_type = other RNA
gtagagacgggatttcaccatg

SEQ ID NO: 18683 - RNA, 22 nt, synthetic construct
  source 1..22: mol_type = other RNA
caccatgttgcccgggctggtc

SEQ ID NO: 18684 - RNA, 22 nt, synthetic construct
  source 1..22: mol_type = other RNA
accatgttgcccgggctggtct

SEQ ID NO: 18685 - RNA, 22 nt, synthetic construct
  source 1..22: mol_type = other RNA
cccgggctggtctcaaactcct

SEQ ID NO: 18686 - RNA, 22 nt, synthetic construct
  source 1..22: mol_type = other RNA
tccagaactaatattgggaaaa

SEQ ID NO: 18687 - RNA, 22 nt, synthetic construct
  source 1..22: mol_type = other RNA
ggaaaactgatgttcagagagg

SEQ ID NO: 18688 - RNA, 22 nt, synthetic construct
  source 1..22: mol_type = other RNA
agagaggtcaagtgacttggct

SEQ ID NO: 18689 - RNA, 22 nt, synthetic construct
  source 1..22: mol_type = other RNA
agatgcaagctcctaaaccaca

SEQ ID NO: 18690 - RNA, 22 nt, synthetic construct
  source 1..22: mol_type = other RNA
cactgaggcgtgtgaacctcct

SEQ ID NO: 18691 - RNA, 22 nt, synthetic construct
  source 1..22: mol_type = other RNA
actgaggcgtgtgaacctcctc

SEQ ID NO: 18692 - RNA, 22 nt, synthetic construct
  source 1..22: mol_type = other RNA
ccccagagctttttgggaactc

SEQ ID NO: 18693 - RNA, 22 nt, synthetic construct
  source 1..22: mol_type = other RNA
cccagagctttttgggaactca

SEQ ID NO: 18694 - RNA, 22 nt, synthetic construct
  source 1..22: mol_type = other RNA
tgggaactcagatggtgtggag

SEQ ID NO: 18695 - RNA, 22 nt, synthetic construct
  source 1..22: mol_type = other RNA
gggaactcagatggtgtggagg

SEQ ID NO: 18696 - RNA, 22 nt, synthetic construct
  source 1..22: mol_type = other RNA
ggaactcagatggtgtggagga

SEQ ID NO: 18697 - RNA, 22 nt, synthetic construct
  source 1..22: mol_type = other RNA
ggggcttctgggagggggtttc

SEQ ID NO: 18698 - RNA, 22 nt, synthetic construct
  source 1..22: mol_type = other RNA
cttcttgtccaggttgagccaa

SEQ ID NO: 18699 - RNA, 22 nt, synthetic construct
  source 1..22: mol_type = other RNA
ttcttgtccaggttgagccaat

SEQ ID NO: 18700 - RNA, 22 nt, synthetic construct
  source 1..22: mol_type = other RNA
agccaatgacgcagatcttagg

SEQ ID NO: 18701 - RNA, 22 nt, synthetic construct
  source 1..22: mol_type = other RNA
tgcccaggcaacttctcagtgg

SEQ ID NO: 18702 - RNA, 22 nt, synthetic construct
  source 1..22: mol_type = other RNA
gcccaggcaacttctcagtggt

SEQ ID NO: 18703 - RNA, 22 nt, synthetic construct
  source 1..22: mol_type = other RNA
cccaggcaacttctcagtggtg

SEQ ID NO: 18704 - RNA, 22 nt, synthetic construct
  source 1..22: mol_type = other RNA
ttttttttctgagacacagtct

SEQ ID NO: 18705 - RNA, 22 nt, synthetic construct
  source 1..22: mol_type = other RNA
tttttttctgagacacagtctg

SEQ ID NO: 18706 - RNA, 22 nt, synthetic construct
  source 1..22: mol_type = other RNA
ttttttctgagacacagtctgg

SEQ ID NO: 18707 - RNA, 22 nt, synthetic construct
  source 1..22: mol_type = other RNA
tttttctgagacacagtctggc

SEQ ID NO: 18708 - RNA, 22 nt, synthetic construct
  source 1..22: mol_type = other RNA
ttttctgagacacagtctggct

SEQ ID NO: 18709 - RNA, 22 nt, synthetic construct
  source 1..22: mol_type = other RNA
tttctgagacacagtctggctc

SEQ ID NO: 18710 - RNA, 22 nt, synthetic construct
  source 1..22: mol_type = other RNA
ttctgagacacagtctggctct

SEQ ID NO: 18711 - RNA, 22 nt, synthetic construct
  source 1..22: mol_type = other RNA
tctgagacacagtctggctcta

SEQ ID NO: 18712 - RNA, 22 nt, synthetic construct
  source 1..22: mol_type = other RNA
ctgagacacagtctggctctat

SEQ ID NO: 18713 - RNA, 22 nt, synthetic construct
  source 1..22: mol_type = other RNA
tgagacacagtctggctctatc

SEQ ID NO: 18714 - RNA, 22 nt, synthetic construct
  source 1..22: mol_type = other RNA
actgcagccttgacacctcccc

SEQ ID NO: 18715 - RNA, 22 nt, synthetic construct
  source 1..22: mol_type = other RNA
tacagatgcacatcaccacgcc

SEQ ID NO: 18716 - RNA, 22 nt, synthetic construct
  source 1..22: mol_type = other RNA
tgtgttatttgtagagataggg

SEQ ID NO: 18717 - RNA, 22 nt, synthetic construct
  source 1..22: mol_type = other RNA
gtgttatttgtagagatagggc

SEQ ID NO: 18718 - RNA, 22 nt, synthetic construct
  source 1..22: mol_type = other RNA
tgttatttgtagagatagggct

SEQ ID NO: 18719 - RNA, 22 nt, synthetic construct
  source 1..22: mol_type = other RNA
tttgtagagatagggcttcacc

SEQ ID NO: 18720 - RNA, 22 nt, synthetic construct
  source 1..22: mol_type = other RNA
gtagagatagggcttcaccatg

SEQ ID NO: 18721 - RNA, 22 nt, synthetic construct
  source 1..22: mol_type = other RNA
tagagatagggcttcaccatgt

SEQ ID NO: 18722 - RNA, 22 nt, synthetic construct
  source 1..22: mol_type = other RNA
cccaggctggtctcaaactcct

SEQ ID NO: 18723 - RNA, 22 nt, synthetic construct
  source 1..22: mol_type = other RNA
ctacagatgtgagccaccatgc

SEQ ID NO: 18724 - RNA, 22 nt, synthetic construct
  source 1..22: mol_type = other RNA
tacagatgtgagccaccatgcc

SEQ ID NO: 18725 - RNA, 22 nt, synthetic construct
  source 1..22: mol_type = other RNA
ctatgaagtctgcagggtcccc

SEQ ID NO: 18726 - RNA, 22 nt, synthetic construct
  source 1..22: mol_type = other RNA
gacctcggaagaaatggaaggg

SEQ ID NO: 18727 - RNA, 22 nt, synthetic construct
  source 1..22: mol_type = other RNA
acctcggaagaaatggaaggga

SEQ ID NO: 18728 - RNA, 22 nt, synthetic construct
  source 1..22: mol_type = other RNA
tcactctcacaaacgtaagaag

SEQ ID NO: 18729 - RNA, 22 nt, synthetic construct
  source 1..22: mol_type = other RNA
tactcaccatgtagaagctgtg

SEQ ID NO: 18730 - RNA, 22 nt, synthetic construct
  source 1..22: mol_type = other RNA
attcagcacttactgattgcca

SEQ ID NO: 18731 - RNA, 22 nt, synthetic construct
  source 1..22: mol_type = other RNA
agcacttactgattgccagtcc

SEQ ID NO: 18732 - RNA, 22 nt, synthetic construct
  source 1..22: mol_type = other RNA
ccagtcccattgctaagggctc

SEQ ID NO: 18733 - RNA, 22 nt, synthetic construct
  source 1..22: mol_type = other RNA
ctaagggctccgcgtgacttaa

SEQ ID NO: 18734 - RNA, 22 nt, synthetic construct
  source 1..22: mol_type = other RNA
ccaattattattcgcattttat

SEQ ID NO: 18735 - RNA, 22 nt, synthetic construct
  source 1..22: mol_type = other RNA
ttattcgcattttatagatatg

SEQ ID NO: 18736 - RNA, 22 nt, synthetic construct
  source 1..22: mol_type = other RNA
ttcgcattttatagatatggaa

SEQ ID NO: 18737 - RNA, 22 nt, synthetic construct
  source 1..22: mol_type = other RNA
gcattttatagatatggaaact

SEQ ID NO: 18738 - RNA, 22 nt, synthetic construct
  source 1..22: mol_type = other RNA
tatagatatggaaactgaggct

SEQ ID NO: 18739 - RNA, 22 nt, synthetic construct
  source 1..22: mol_type = other RNA
atagatatggaaactgaggctc

SEQ ID NO: 18740 - RNA, 22 nt, synthetic construct
  source 1..22: mol_type = other RNA
tagatatggaaactgaggctcc

SEQ ID NO: 18741 - RNA, 22 nt, synthetic construct
  source 1..22: mol_type = other RNA
aaaaaatgaacttgcccaggtt

SEQ ID NO: 18742 - RNA, 22 nt, synthetic construct
  source 1..22: mol_type = other RNA
aaaaatgaacttgcccaggtta

SEQ ID NO: 18743 - RNA, 22 nt, synthetic construct
  source 1..22: mol_type = other RNA
cagtgtgttggtaggtaggggt

SEQ ID NO: 18744 - RNA, 22 nt, synthetic construct
  source 1..22: mol_type = other RNA
gtaggtaggggtagtctcaaag

SEQ ID NO: 18745 - RNA, 22 nt, synthetic construct
  source 1..22: mol_type = other RNA
gtaaattttacgccaaagctca

SEQ ID NO: 18746 - RNA, 22 nt, synthetic construct
  source 1..22: mol_type = other RNA
tacgccaaagctcacgatactt

SEQ ID NO: 18747 - RNA, 22 nt, synthetic construct
  source 1..22: mol_type = other RNA
acgccaaagctcacgatacttg

SEQ ID NO: 18748 - RNA, 22 nt, synthetic construct
  source 1..22: mol_type = other RNA
cgccaaagctcacgatacttgc

SEQ ID NO: 18749 - RNA, 22 nt, synthetic construct
  source 1..22: mol_type = other RNA
ccttctcaatttatttctctga

SEQ ID NO: 18750 - RNA, 22 nt, synthetic construct
  source 1..22: mol_type = other RNA
atttctctgactgtgtgcttaa

SEQ ID NO: 18751 - RNA, 22 nt, synthetic construct
  source 1..22: mol_type = other RNA
tttctctgactgtgtgcttaac

SEQ ID NO: 18752 - RNA, 22 nt, synthetic construct
  source 1..22: mol_type = other RNA
ctctgactgtgtgcttaaccac

SEQ ID NO: 18753 - RNA, 22 nt, synthetic construct
  source 1..22: mol_type = other RNA
tctgactgtgtgcttaaccaca

SEQ ID NO: 18754 - RNA, 22 nt, synthetic construct
  source 1..22: mol_type = other RNA
gaagcagagctcatcaataagt

SEQ ID NO: 18755 - RNA, 22 nt, synthetic construct
  source 1..22: mol_type = other RNA
aagcagagctcatcaataagtg

SEQ ID NO: 18756 - RNA, 22 nt, synthetic construct
  source 1..22: mol_type = other RNA
cattgggaacattttgactggg

SEQ ID NO: 18757 - RNA, 22 nt, synthetic construct
  source 1..22: mol_type = other RNA
attgggaacattttgactgggg

SEQ ID NO: 18758 - RNA, 22 nt, synthetic construct
  source 1..22: mol_type = other RNA
ggaacattttgactggggggaa

SEQ ID NO: 18759 - RNA, 22 nt, synthetic construct
  source 1..22: mol_type = other RNA
tgactggggggaaagagcacca

SEQ ID NO: 18760 - RNA, 22 nt, synthetic construct
  source 1..22: mol_type = other RNA
gactggggggaaagagcaccag

SEQ ID NO: 18761 - RNA, 22 nt, synthetic construct
  source 1..22: mol_type = other RNA
actggggggaaagagcaccagc

SEQ ID NO: 18762 - RNA, 22 nt, synthetic construct
  source 1..22: mol_type = other RNA
gggtaacttattattttataga

SEQ ID NO: 18763 - RNA, 22 nt, synthetic construct
  source 1..22: mol_type = other RNA
ggtaacttattattttatagat

SEQ ID NO: 18764 - RNA, 22 nt, synthetic construct
  source 1..22: mol_type = other RNA
ttttatagatatggaattatct

SEQ ID NO: 18765 - RNA, 22 nt, synthetic construct
  source 1..22: mol_type = other RNA
tatagatatggaattatcttat

SEQ ID NO: 18766 - RNA, 22 nt, synthetic construct
  source 1..22: mol_type = other RNA
atagatatggaattatcttata

SEQ ID NO: 18767 - RNA, 22 nt, synthetic construct
  source 1..22: mol_type = other RNA
tagatatggaattatcttatag

SEQ ID NO: 18768 - RNA, 22 nt, synthetic construct
  source 1..22: mol_type = other RNA
tcttatagaaatgttatagata

SEQ ID NO: 18769 - RNA, 22 nt, synthetic construct
  source 1..22: mol_type = other RNA
tagatatggaatcattttatag

SEQ ID NO: 18770 - RNA, 22 nt, synthetic construct
  source 1..22: mol_type = other RNA
tatagatatggcccaaagtcca

SEQ ID NO: 18771 - RNA, 22 nt, synthetic construct
  source 1..22: mol_type = other RNA
atagatatggcccaaagtccaa

SEQ ID NO: 18772 - RNA, 22 nt, synthetic construct
  source 1..22: mol_type = other RNA
tagatatggcccaaagtccaaa

SEQ ID NO: 18773 - RNA, 22 nt, synthetic construct
  source 1..22: mol_type = other RNA
acggagttgctaggatcagtct

SEQ ID NO: 18774 - RNA, 22 nt, synthetic construct
  source 1..22: mol_type = other RNA
ctaggatcagtctggagctctt

SEQ ID NO: 18775 - RNA, 22 nt, synthetic construct
  source 1..22: mol_type = other RNA
ctgcaatgtaggttcttaataa

SEQ ID NO: 18776 - RNA, 22 nt, synthetic construct
  source 1..22: mol_type = other RNA
ttaataaagagcatgggtggaa

SEQ ID NO: 18777 - RNA, 22 nt, synthetic construct
  source 1..22: mol_type = other RNA
ctcactgctctgagagaacaga

SEQ ID NO: 18778 - RNA, 22 nt, synthetic construct
  source 1..22: mol_type = other RNA
tcactgctctgagagaacagat

SEQ ID NO: 18779 - RNA, 22 nt, synthetic construct
  source 1..22: mol_type = other RNA
tgtgcctgtgtccctgaccaag

SEQ ID NO: 18780 - RNA, 22 nt, synthetic construct
  source 1..22: mol_type = other RNA
gtgcctgtgtccctgaccaagg

SEQ ID NO: 18781 - RNA, 22 nt, synthetic construct
  source 1..22: mol_type = other RNA
tgcctgtgtccctgaccaaggg

SEQ ID NO: 18782 - RNA, 22 nt, synthetic construct
  source 1..22: mol_type = other RNA
gccctgctccaggaaaagggcg

SEQ ID NO: 18783 - RNA, 22 nt, synthetic construct
  source 1..22: mol_type = other RNA
agttctgcttcctctagtcatg

SEQ ID NO: 18784 - RNA, 22 nt, synthetic construct
  source 1..22: mol_type = other RNA
tgcttcctctagtcatggttgg

SEQ ID NO: 18785 - RNA, 22 nt, synthetic construct
  source 1..22: mol_type = other RNA
gctgggatctcgctgcaagccg

SEQ ID NO: 18786 - RNA, 22 nt, synthetic construct
  source 1..22: mol_type = other RNA
tgtttgggttcctgcagccccc

SEQ ID NO: 18787 - RNA, 22 nt, synthetic construct
  source 1..22: mol_type = other RNA
gggttcctgcagcccccgctca

SEQ ID NO: 18788 - RNA, 22 nt, synthetic construct
  source 1..22: mol_type = other RNA
ggttcctgcagcccccgctcaa

SEQ ID NO: 18789 - RNA, 22 nt, synthetic construct
  source 1..22: mol_type = other RNA
ctgcagcccccgctcaaccgtc

SEQ ID NO: 18790 - RNA, 22 nt, synthetic construct
  source 1..22: mol_type = other RNA
tctgtgacatccgggggtctgt

SEQ ID NO: 18791 - RNA, 22 nt, synthetic construct
  source 1..22: mol_type = other RNA
ggaggccaaggcgggtggatca

SEQ ID NO: 18792 - RNA, 22 nt, synthetic construct
  source 1..22: mol_type = other RNA
gaaaccagcctgaccaacatgg

SEQ ID NO: 18793 - RNA, 22 nt, synthetic construct
  source 1..22: mol_type = other RNA
ctaaaaataaaaaaattagcca

SEQ ID NO: 18794 - RNA, 22 nt, synthetic construct
  source 1..22: mol_type = other RNA
gccaggcatggtggcgggtgcc

SEQ ID NO: 18795 - RNA, 22 nt, synthetic construct
  source 1..22: mol_type = other RNA
aagcaggagaattgcttgaatc

SEQ ID NO: 18796 - RNA, 22 nt, synthetic construct
  source 1..22: mol_type = other RNA
cttgaatccgggaggcagaggt

SEQ ID NO: 18797 - RNA, 22 nt, synthetic construct
  source 1..22: mol_type = other RNA
cagtgagccaagattgcaccac

SEQ ID NO: 18798 - RNA, 22 nt, synthetic construct
  source 1..22: mol_type = other RNA
caccactgcactccagcctggg

SEQ ID NO: 18799 - RNA, 22 nt, synthetic construct
  source 1..22: mol_type = other RNA
agtgtgtgttttctcatgagct

SEQ ID NO: 18800 - RNA, 22 nt, synthetic construct
  source 1..22: mol_type = other RNA
tctcatgagcttactcttcaat

SEQ ID NO: 18801 - RNA, 22 nt, synthetic construct
  source 1..22: mol_type = other RNA
ctcatgagcttactcttcaatg

SEQ ID NO: 18802 - RNA, 22 nt, synthetic construct
  source 1..22: mol_type = other RNA
tcatgagcttactcttcaatgt

SEQ ID NO: 18803 - RNA, 22 nt, synthetic construct
  source 1..22: mol_type = other RNA
tcttctgggcccagaacagggc

SEQ ID NO: 18804 - RNA, 22 nt, synthetic construct
  source 1..22: mol_type = other RNA
ctttccagccttcatctgcatg

SEQ ID NO: 18805 - RNA, 22 nt, synthetic construct
  source 1..22: mol_type = other RNA
tttccagccttcatctgcatgt

SEQ ID NO: 18806 - RNA, 22 nt, synthetic construct
  source 1..22: mol_type = other RNA
cagccttcatctgcatgtcatg

SEQ ID NO: 18807 - RNA, 22 nt, synthetic construct
  source 1..22: mol_type = other RNA
aaaggtggccccccaaaagata

SEQ ID NO: 18808 - RNA, 22 nt, synthetic construct
  source 1..22: mol_type = other RNA
tttgggaaaagggtctttgcag

SEQ ID NO: 18809 - RNA, 22 nt, synthetic construct
  source 1..22: mol_type = other RNA
gggaaaagggtctttgcagata

SEQ ID NO: 18810 - RNA, 22 nt, synthetic construct
  source 1..22: mol_type = other RNA
ggaaaagggtctttgcagatag

SEQ ID NO: 18811 - RNA, 22 nt, synthetic construct
  source 1..22: mol_type = other RNA
cagatagaattaagttaagggg

SEQ ID NO: 18812 - RNA, 22 nt, synthetic construct
  source 1..22: mol_type = other RNA
agttaaggggctgggtgcagtg

SEQ ID NO: 18813 - RNA, 22 nt, synthetic construct
  source 1..22: mol_type = other RNA
aggggctgggtgcagtggctca

SEQ ID NO: 18814 - RNA, 22 nt, synthetic construct
  source 1..22: mol_type = other RNA
ggaagctgagattggaggatca

SEQ ID NO: 18815 - RNA, 22 nt, synthetic construct
  source 1..22: mol_type = other RNA
gaggatcacctgaggtcaggag

SEQ ID NO: 18816 - RNA, 22 nt, synthetic construct
  source 1..22: mol_type = other RNA
aagaccagcgtggccaacatgg

SEQ ID NO: 18817 - RNA, 22 nt, synthetic construct
  source 1..22: mol_type = other RNA
ctactaaaaatacaaaaattag

SEQ ID NO: 18818 - RNA, 22 nt, synthetic construct
  source 1..22: mol_type = other RNA
tactaaaaatacaaaaattagc

SEQ ID NO: 18819 - RNA, 22 nt, synthetic construct
  source 1..22: mol_type = other RNA
gctggtcatggtggtgagcacc

SEQ ID NO: 18820 - RNA, 22 nt, synthetic construct
  source 1..22: mol_type = other RNA
cagtgagccgatacagcgccac

SEQ ID NO: 18821 - RNA, 22 nt, synthetic construct
  source 1..22: mol_type = other RNA
cagcctgggcaacagagcaagc

SEQ ID NO: 18822 - RNA, 22 nt, synthetic construct
  source 1..22: mol_type = other RNA
aagatcttgaaatgacatcatc

SEQ ID NO: 18823 - RNA, 22 nt, synthetic construct
  source 1..22: mol_type = other RNA
tctaggtgggtcctaaatccaa

SEQ ID NO: 18824 - RNA, 22 nt, synthetic construct
  source 1..22: mol_type = other RNA
taagagaaagagacttgctaca

SEQ ID NO: 18825 - RNA, 22 nt, synthetic construct
  source 1..22: mol_type = other RNA
agagtgatgcagccacaagacc

SEQ ID NO: 18826 - RNA, 22 nt, synthetic construct
  source 1..22: mol_type = other RNA
gagtgatgcagccacaagacca

SEQ ID NO: 18827 - RNA, 22 nt, synthetic construct
  source 1..22: mol_type = other RNA
ccagcagctagaggaggcaagg

SEQ ID NO: 18828 - RNA, 22 nt, synthetic construct
  source 1..22: mol_type = other RNA
tcccctcgagcctccagaggca

SEQ ID NO: 18829 - RNA, 22 nt, synthetic construct
  source 1..22: mol_type = other RNA
ttctgagctacctggatgctgg

SEQ ID NO: 18830 - RNA, 22 nt, synthetic construct
  source 1..22: mol_type = other RNA
tgagctacctggatgctggtac

SEQ ID NO: 18831 - RNA, 22 nt, synthetic construct
  source 1..22: mol_type = other RNA
cagcagccctgggaaatgaata

SEQ ID NO: 18832 - RNA, 22 nt, synthetic construct
  source 1..22: mol_type = other RNA
agcagccctgggaaatgaatat

SEQ ID NO: 18833 - RNA, 22 nt, synthetic construct
  source 1..22: mol_type = other RNA
cccagcaagagctacatgatct

SEQ ID NO: 18834 - RNA, 22 nt, synthetic construct
  source 1..22: mol_type = other RNA
ttcatctgccaatggagacaat

SEQ ID NO: 18835 - RNA, 22 nt, synthetic construct
  source 1..22: mol_type = other RNA
taacagctttattgagatgtaa

SEQ ID NO: 18836 - RNA, 22 nt, synthetic construct
  source 1..22: mol_type = other RNA
aacagctttattgagatgtaat

SEQ ID NO: 18837 - RNA, 22 nt, synthetic construct
  source 1..22: mol_type = other RNA
acagctttattgagatgtaatt

SEQ ID NO: 18838 - RNA, 22 nt, synthetic construct
  source 1..22: mol_type = other RNA
ttgagatgtaattcacatatac

SEQ ID NO: 18839 - RNA, 22 nt, synthetic construct
  source 1..22: mol_type = other RNA
agatgtaattcacatatacaat

SEQ ID NO: 18840 - RNA, 22 nt, synthetic construct
  source 1..22: mol_type = other RNA
acatatacaatttgcccactta

SEQ ID NO: 18841 - RNA, 22 nt, synthetic construct
  source 1..22: mol_type = other RNA
gcccacttaaaaagtacagttc

SEQ ID NO: 18842 - RNA, 22 nt, synthetic construct
  source 1..22: mol_type = other RNA
cccacttaaaaagtacagttca

SEQ ID NO: 18843 - RNA, 22 nt, synthetic construct
  source 1..22: mol_type = other RNA
atgcctgtaatcccaacacttt

SEQ ID NO: 18844 - RNA, 22 nt, synthetic construct
  source 1..22: mol_type = other RNA
ggaggccgaggagacaggcgga

SEQ ID NO: 18845 - RNA, 22 nt, synthetic construct
  source 1..22: mol_type = other RNA
gagaacagcctggccaaaatgg

SEQ ID NO: 18846 - RNA, 22 nt, synthetic construct
  source 1..22: mol_type = other RNA
agaacagcctggccaaaatggt

SEQ ID NO: 18847 - RNA, 22 nt, synthetic construct
  source 1..22: mol_type = other RNA
gccgggtgtggtggtgggtgcc

SEQ ID NO: 18848 - RNA, 22 nt, synthetic construct
  source 1..22: mol_type = other RNA
cagtgagccaagattgcacccc

SEQ ID NO: 18849 - RNA, 22 nt, synthetic construct
  source 1..22: mol_type = other RNA
cacccctgcactccagcctggg

SEQ ID NO: 18850 - RNA, 22 nt, synthetic construct
  source 1..22: mol_type = other RNA
agtgttcttttgggaatactca

SEQ ID NO: 18851 - RNA, 22 nt, synthetic construct
  source 1..22: mol_type = other RNA
ttttgggaatactcagagagtt

SEQ ID NO: 18852 - RNA, 22 nt, synthetic construct
  source 1..22: mol_type = other RNA
gggaatactcagagagttgtgt

SEQ ID NO: 18853 - RNA, 22 nt, synthetic construct
  source 1..22: mol_type = other RNA
ggaatactcagagagttgtgtg

SEQ ID NO: 18854 - RNA, 22 nt, synthetic construct
  source 1..22: mol_type = other RNA
tgtgaccatctcccatccccac

SEQ ID NO: 18855 - RNA, 22 nt, synthetic construct
  source 1..22: mol_type = other RNA
tagcacatttcatcacccccta

SEQ ID NO: 18856 - RNA, 22 nt, synthetic construct
  source 1..22: mol_type = other RNA
agcacatttcatcaccccctaa

SEQ ID NO: 18857 - RNA, 22 nt, synthetic construct
  source 1..22: mol_type = other RNA
gcacatttcatcaccccctaaa

SEQ ID NO: 18858 - RNA, 22 nt, synthetic construct
  source 1..22: mol_type = other RNA
catcaccccctaaagaaactcc

SEQ ID NO: 18859 - RNA, 22 nt, synthetic construct
  source 1..22: mol_type = other RNA
atcaccccctaaagaaactcca

SEQ ID NO: 18860 - RNA, 22 nt, synthetic construct
  source 1..22: mol_type = other RNA
ttccccatttccttccaaaatc

SEQ ID NO: 18861 - RNA, 22 nt, synthetic construct
  source 1..22: mol_type = other RNA
cccatttccttccaaaatccct

SEQ ID NO: 18862 - RNA, 22 nt, synthetic construct
  source 1..22: mol_type = other RNA
ccttccaaaatccctctctgcc

SEQ ID NO: 18863 - RNA, 22 nt, synthetic construct
  source 1..22: mol_type = other RNA
cttccaaaatccctctctgcca

SEQ ID NO: 18864 - RNA, 22 nt, synthetic construct
  source 1..22: mol_type = other RNA
tttcttaaaaaaaaattaatag

SEQ ID NO: 18865 - RNA, 22 nt, synthetic construct
  source 1..22: mol_type = other RNA
ttaaaaaaaaattaatagagat

SEQ ID NO: 18866 - RNA, 22 nt, synthetic construct
  source 1..22: mol_type = other RNA
atagagataggcttttgctatg

SEQ ID NO: 18867 - RNA, 22 nt, synthetic construct
  source 1..22: mol_type = other RNA
gctatgttgcccaggctggtct

SEQ ID NO: 18868 - RNA, 22 nt, synthetic construct
  source 1..22: mol_type = other RNA
ctatgttgcccaggctggtctt

SEQ ID NO: 18869 - RNA, 22 nt, synthetic construct
  source 1..22: mol_type = other RNA
cccaggctggtcttgaacacct

SEQ ID NO: 18870 - RNA, 22 nt, synthetic construct
  source 1..22: mol_type = other RNA
tcctgtctcagcctcccaaagt

SEQ ID NO: 18871 - RNA, 22 nt, synthetic construct
  source 1..22: mol_type = other RNA
caggcatgagccaccacgcccc

SEQ ID NO: 18872 - RNA, 22 nt, synthetic construct
  source 1..22: mol_type = other RNA
aggcatgagccaccacgcccca

SEQ ID NO: 18873 - RNA, 22 nt, synthetic construct
  source 1..22: mol_type = other RNA
tgtctccatggatttgcctgtt

SEQ ID NO: 18874 - RNA, 22 nt, synthetic construct
  source 1..22: mol_type = other RNA
gcctgttttggtcatttcaaat

SEQ ID NO: 18875 - RNA, 22 nt, synthetic construct
  source 1..22: mol_type = other RNA
cctgttttggtcatttcaaata

SEQ ID NO: 18876 - RNA, 22 nt, synthetic construct
  source 1..22: mol_type = other RNA
tggtcatttcaaataaatagaa

SEQ ID NO: 18877 - RNA, 22 nt, synthetic construct
  source 1..22: mol_type = other RNA
ggtcatttcaaataaatagaat

SEQ ID NO: 18878 - RNA, 22 nt, synthetic construct
  source 1..22: mol_type = other RNA
gtcatttcaaataaatagaatc

SEQ ID NO: 18879 - RNA, 22 nt, synthetic construct
  source 1..22: mol_type = other RNA
caaataaatagaatcatacaat

SEQ ID NO: 18880 - RNA, 22 nt, synthetic construct
  source 1..22: mol_type = other RNA
aaataaatagaatcatacaata

SEQ ID NO: 18881 - RNA, 22 nt, synthetic construct
  source 1..22: mol_type = other RNA
tgtccggcttcttcacttagca

SEQ ID NO: 18882 - RNA, 22 nt, synthetic construct
  source 1..22: mol_type = other RNA
tttttaaggttcatccatgttc

SEQ ID NO: 18883 - RNA, 22 nt, synthetic construct
  source 1..22: mol_type = other RNA
ttttaaggttcatccatgttcc

SEQ ID NO: 18884 - RNA, 22 nt, synthetic construct
  source 1..22: mol_type = other RNA
tttaaggttcatccatgttcca

SEQ ID NO: 18885 - RNA, 22 nt, synthetic construct
  source 1..22: mol_type = other RNA
ttaaggttcatccatgttccag

SEQ ID NO: 18886 - RNA, 22 nt, synthetic construct
  source 1..22: mol_type = other RNA
taaggttcatccatgttccagc

SEQ ID NO: 18887 - RNA, 22 nt, synthetic construct
  source 1..22: mol_type = other RNA
aaggttcatccatgttccagca

SEQ ID NO: 18888 - RNA, 22 nt, synthetic construct
  source 1..22: mol_type = other RNA
aggttcatccatgttccagcat

SEQ ID NO: 18889 - RNA, 22 nt, synthetic construct
  source 1..22: mol_type = other RNA
atccatgttccagcatgtatca

SEQ ID NO: 18890 - RNA, 22 nt, synthetic construct
  source 1..22: mol_type = other RNA
cagcatgtatcagtgctttctc

SEQ ID NO: 18891 - RNA, 22 nt, synthetic construct
  source 1..22: mol_type = other RNA
tccctttaatggtggaatactt

SEQ ID NO: 18892 - RNA, 22 nt, synthetic construct
  source 1..22: mol_type = other RNA
atggtggaatactttattgtat

SEQ ID NO: 18893 - RNA, 22 nt, synthetic construct
  source 1..22: mol_type = other RNA
ttgtatagataagcaacatttt

SEQ ID NO: 18894 - RNA, 22 nt, synthetic construct
  source 1..22: mol_type = other RNA
tatagataagcaacattttgtt

SEQ ID NO: 18895 - RNA, 22 nt, synthetic construct
  source 1..22: mol_type = other RNA
tgtttatccatttattttttgg

SEQ ID NO: 18896 - RNA, 22 nt, synthetic construct
  source 1..22: mol_type = other RNA
gtttatccatttattttttggt

SEQ ID NO: 18897 - RNA, 22 nt, synthetic construct
  source 1..22: mol_type = other RNA
tttatccatttattttttggtg

SEQ ID NO: 18898 - RNA, 22 nt, synthetic construct
  source 1..22: mol_type = other RNA
atccatttattttttggtggat

SEQ ID NO: 18899 - RNA, 22 nt, synthetic construct
  source 1..22: mol_type = other RNA
tccatttattttttggtggata

SEQ ID NO: 18900 - RNA, 22 nt, synthetic construct
  source 1..22: mol_type = other RNA
attttttggtggatatttgggc

SEQ ID NO: 18901 - RNA, 22 nt, synthetic construct
  source 1..22: mol_type = other RNA
ttttttggtggatatttgggct

SEQ ID NO: 18902 - RNA, 22 nt, synthetic construct
  source 1..22: mol_type = other RNA
tttggtggatatttgggctgtt

SEQ ID NO: 18903 - RNA, 22 nt, synthetic construct
  source 1..22: mol_type = other RNA
ttggtggatatttgggctgttt

SEQ ID NO: 18904 - RNA, 22 nt, synthetic construct
  source 1..22: mol_type = other RNA
tggtggatatttgggctgtttt

SEQ ID NO: 18905 - RNA, 22 nt, synthetic construct
  source 1..22: mol_type = other RNA
ggtggatatttgggctgttttt

SEQ ID NO: 18906 - RNA, 22 nt, synthetic construct
  source 1..22: mol_type = other RNA
gtggatatttgggctgttttta

SEQ ID NO: 18907 - RNA, 22 nt, synthetic construct
  source 1..22: mol_type = other RNA
gggctgtttttatattttggct

SEQ ID NO: 18908 - RNA, 22 nt, synthetic construct
  source 1..22: mol_type = other RNA
ggctgtttttatattttggcta

SEQ ID NO: 18909 - RNA, 22 nt, synthetic construct
  source 1..22: mol_type = other RNA
ttatattttggctattttgaat

SEQ ID NO: 18910 - RNA, 22 nt, synthetic construct
  source 1..22: mol_type = other RNA
tatattttggctattttgaatt

SEQ ID NO: 18911 - RNA, 22 nt, synthetic construct
  source 1..22: mol_type = other RNA
atattttggctattttgaatta

SEQ ID NO: 18912 - RNA, 22 nt, synthetic construct
  source 1..22: mol_type = other RNA
tattttggctattttgaattat

SEQ ID NO: 18913 - RNA, 22 nt, synthetic construct
  source 1..22: mol_type = other RNA
tggctattttgaattatccttc

SEQ ID NO: 18914 - RNA, 22 nt, synthetic construct
  source 1..22: mol_type = other RNA
ggctattttgaattatccttct

SEQ ID NO: 18915 - RNA, 22 nt, synthetic construct
  source 1..22: mol_type = other RNA
gctattttgaattatccttctg

SEQ ID NO: 18916 - RNA, 22 nt, synthetic construct
  source 1..22: mol_type = other RNA
tgaattatccttctgtgaacat

SEQ ID NO: 18917 - RNA, 22 nt, synthetic construct
  source 1..22: mol_type = other RNA
gaattatccttctgtgaacatt

SEQ ID NO: 18918 - RNA, 22 nt, synthetic construct
  source 1..22: mol_type = other RNA
aattatccttctgtgaacattc

SEQ ID NO: 18919 - RNA, 22 nt, synthetic construct
  source 1..22: mol_type = other RNA
tccttctgtgaacattcgtgta

SEQ ID NO: 18920 - RNA, 22 nt, synthetic construct
  source 1..22: mol_type = other RNA
gtgtataggtttttgtgtggat

SEQ ID NO: 18921 - RNA, 22 nt, synthetic construct
  source 1..22: mol_type = other RNA
ttgtgtggatatatctggtttt

SEQ ID NO: 18922 - RNA, 22 nt, synthetic construct
  source 1..22: mol_type = other RNA
tgtgtggatatatctggttttt

SEQ ID NO: 18923 - RNA, 22 nt, synthetic construct
  source 1..22: mol_type = other RNA
gtgtggatatatctggtttttc

SEQ ID NO: 18924 - RNA, 22 nt, synthetic construct
  source 1..22: mol_type = other RNA
tgtggatatatctggtttttct

SEQ ID NO: 18925 - RNA, 22 nt, synthetic construct
  source 1..22: mol_type = other RNA
ttcttgttttcttttgttttat

SEQ ID NO: 18926 - RNA, 22 nt, synthetic construct
  source 1..22: mol_type = other RNA
tcttgttttcttttgttttatt

SEQ ID NO: 18927 - RNA, 22 nt, synthetic construct
  source 1..22: mol_type = other RNA
cttgttttcttttgttttatta

SEQ ID NO: 18928 - RNA, 22 nt, synthetic construct
  source 1..22: mol_type = other RNA
ttgttttcttttgttttattaa

SEQ ID NO: 18929 - RNA, 22 nt, synthetic construct
  source 1..22: mol_type = other RNA
tcttttgttttattaatacata

SEQ ID NO: 18930 - RNA, 22 nt, synthetic construct
  source 1..22: mol_type = other RNA
cttttgttttattaatacataa

SEQ ID NO: 18931 - RNA, 22 nt, synthetic construct
  source 1..22: mol_type = other RNA
ttttgttttattaatacataat

SEQ ID NO: 18932 - RNA, 22 nt, synthetic construct
  source 1..22: mol_type = other RNA
gttttattaatacataatatga

SEQ ID NO: 18933 - RNA, 22 nt, synthetic construct
  source 1..22: mol_type = other RNA
ttttattaatacataatatgat

SEQ ID NO: 18934 - RNA, 22 nt, synthetic construct
  source 1..22: mol_type = other RNA
tattaatacataatatgataca

SEQ ID NO: 18935 - RNA, 22 nt, synthetic construct
  source 1..22: mol_type = other RNA
attaatacataatatgatacat

SEQ ID NO: 18936 - RNA, 22 nt, synthetic construct
  source 1..22: mol_type = other RNA
ttaatacataatatgatacata

SEQ ID NO: 18937 - RNA, 22 nt, synthetic construct
  source 1..22: mol_type = other RNA
atacataatatgatacatattt

SEQ ID NO: 18938 - RNA, 22 nt, synthetic construct
  source 1..22: mol_type = other RNA
atggggtatatgtgaatattta

SEQ ID NO: 18939 - RNA, 22 nt, synthetic construct
  source 1..22: mol_type = other RNA
tggggtatatgtgaatatttat

SEQ ID NO: 18940 - RNA, 22 nt, synthetic construct
  source 1..22: mol_type = other RNA
attacatgcatagaaggtataa

SEQ ID NO: 18941 - RNA, 22 nt, synthetic construct
  source 1..22: mol_type = other RNA
ttacatgcatagaaggtataat

SEQ ID NO: 18942 - RNA, 22 nt, synthetic construct
  source 1..22: mol_type = other RNA
catgcatagaaggtataatgat

SEQ ID NO: 18943 - RNA, 22 nt, synthetic construct
  source 1..22: mol_type = other RNA
gaggtatccacatttgggattg

SEQ ID NO: 18944 - RNA, 22 nt, synthetic construct
  source 1..22: mol_type = other RNA
aggtatccacatttgggattgt

SEQ ID NO: 18945 - RNA, 22 nt, synthetic construct
  source 1..22: mol_type = other RNA
gggattgtttaaagattaaatg

SEQ ID NO: 18946 - RNA, 22 nt, synthetic construct
  source 1..22: mol_type = other RNA
ggattgtttaaagattaaatga

SEQ ID NO: 18947 - RNA, 22 nt, synthetic construct
  source 1..22: mol_type = other RNA
tttaaagattaaatgaaatagt

SEQ ID NO: 18948 - RNA, 22 nt, synthetic construct
  source 1..22: mol_type = other RNA
aaagattaaatgaaatagtgtt

SEQ ID NO: 18949 - RNA, 22 nt, synthetic construct
  source 1..22: mol_type = other RNA
aagattaaatgaaatagtgtta

SEQ ID NO: 18950 - RNA, 22 nt, synthetic construct
  source 1..22: mol_type = other RNA
aatgaaatagtgttaaaagtat

SEQ ID NO: 18951 - RNA, 22 nt, synthetic construct
  source 1..22: mol_type = other RNA
aaagtatttaatatgcccttca

SEQ ID NO: 18952 - RNA, 22 nt, synthetic construct
  source 1..22: mol_type = other RNA
aatatgcccttcaacaaatgat

SEQ ID NO: 18953 - RNA, 22 nt, synthetic construct
  source 1..22: mol_type = other RNA
atatgcccttcaacaaatgatg

SEQ ID NO: 18954 - RNA, 22 nt, synthetic construct
  source 1..22: mol_type = other RNA
acatattaggaaactgaggcac

SEQ ID NO: 18955 - RNA, 22 nt, synthetic construct
  source 1..22: mol_type = other RNA
catattaggaaactgaggcaca

SEQ ID NO: 18956 - RNA, 22 nt, synthetic construct
  source 1..22: mol_type = other RNA
ggaaactgaggcacagaaagga

SEQ ID NO: 18957 - RNA, 22 nt, synthetic construct
  source 1..22: mol_type = other RNA
tggttaaatgcaggacttcagt

SEQ ID NO: 18958 - RNA, 22 nt, synthetic construct
  source 1..22: mol_type = other RNA
aatgcaggacttcagtcagact

SEQ ID NO: 18959 - RNA, 22 nt, synthetic construct
  source 1..22: mol_type = other RNA
aaatcctggttccacttggaca

SEQ ID NO: 18960 - RNA, 22 nt, synthetic construct
  source 1..22: mol_type = other RNA
cacttggacatgggtttcctta

SEQ ID NO: 18961 - RNA, 22 nt, synthetic construct
  source 1..22: mol_type = other RNA
ccttacataaatcacttcacct

SEQ ID NO: 18962 - RNA, 22 nt, synthetic construct
  source 1..22: mol_type = other RNA
cttacataaatcacttcacctc

SEQ ID NO: 18963 - RNA, 22 nt, synthetic construct
  source 1..22: mol_type = other RNA
tctcatatgcaaagtgaggata

SEQ ID NO: 18964 - RNA, 22 nt, synthetic construct
  source 1..22: mol_type = other RNA
ctcatatgcaaagtgaggataa

SEQ ID NO: 18965 - RNA, 22 nt, synthetic construct
  source 1..22: mol_type = other RNA
tcatatgcaaagtgaggataat

SEQ ID NO: 18966 - RNA, 22 nt, synthetic construct
  source 1..22: mol_type = other RNA
ctgatatgagtattaaatgtgc

SEQ ID NO: 18967 - RNA, 22 nt, synthetic construct
  source 1..22: mol_type = other RNA
aatgtgccagctcatgtgcctg

SEQ ID NO: 18968 - RNA, 22 nt, synthetic construct
  source 1..22: mol_type = other RNA
taaaccttagctgttaccactc

SEQ ID NO: 18969 - RNA, 22 nt, synthetic construct
  source 1..22: mol_type = other RNA
ccactcatggcattgccaaatg

SEQ ID NO: 18970 - RNA, 22 nt, synthetic construct
  source 1..22: mol_type = other RNA
ccaaatgtgggacgggtctcct

SEQ ID NO: 18971 - RNA, 22 nt, synthetic construct
  source 1..22: mol_type = other RNA
atggaatccacactttccagtt

SEQ ID NO: 18972 - RNA, 22 nt, synthetic construct
  source 1..22: mol_type = other RNA
ctacctcctgggtatcttctca

SEQ ID NO: 18973 - RNA, 22 nt, synthetic construct
  source 1..22: mol_type = other RNA
tacctcctgggtatcttctcat

SEQ ID NO: 18974 - RNA, 22 nt, synthetic construct
  source 1..22: mol_type = other RNA
taagttccttggaggaagggaa

SEQ ID NO: 18975 - RNA, 22 nt, synthetic construct
  source 1..22: mol_type = other RNA
cttggaggaagggaatgtggct

SEQ ID NO: 18976 - RNA, 22 nt, synthetic construct
  source 1..22: mol_type = other RNA
attcactcctctcatccccagc

SEQ ID NO: 18977 - RNA, 22 nt, synthetic construct
  source 1..22: mol_type = other RNA
ttcactcctctcatccccagcc

SEQ ID NO: 18978 - RNA, 22 nt, synthetic construct
  source 1..22: mol_type = other RNA
actcctctcatccccagccctc

SEQ ID NO: 18979 - RNA, 22 nt, synthetic construct
  source 1..22: mol_type = other RNA
ttgtaggtgtcaattttctgcc

SEQ ID NO: 18980 - RNA, 22 nt, synthetic construct
  source 1..22: mol_type = other RNA
taggtgtcaattttctgcctct

SEQ ID NO: 18981 - RNA, 22 nt, synthetic construct
  source 1..22: mol_type = other RNA
tctgcctctttccaacaccctg

SEQ ID NO: 18982 - RNA, 22 nt, synthetic construct
  source 1..22: mol_type = other RNA
ctgcctctttccaacaccctgt

SEQ ID NO: 18983 - RNA, 22 nt, synthetic construct
  source 1..22: mol_type = other RNA
tgcctctttccaacaccctgtg

SEQ ID NO: 18984 - RNA, 22 nt, synthetic construct
  source 1..22: mol_type = other RNA
caacaccctgtgaggtgactga

SEQ ID NO: 18985 - RNA, 22 nt, synthetic construct
  source 1..22: mol_type = other RNA
tcttccctcccaggcagctcac

SEQ ID NO: 18986 - RNA, 22 nt, synthetic construct
  source 1..22: mol_type = other RNA
gggcccctagaaggtggctacc

SEQ ID NO: 18987 - RNA, 22 nt, synthetic construct
  source 1..22: mol_type = other RNA
agctctactcaggtgggccctc

SEQ ID NO: 18988 - RNA, 22 nt, synthetic construct
  source 1..22: mol_type = other RNA
tggtccctgccctcccgtcagc

SEQ ID NO: 18989 - RNA, 22 nt, synthetic construct
  source 1..22: mol_type = other RNA
cccaccagccctctttccagaa

SEQ ID NO: 18990 - RNA, 22 nt, synthetic construct
  source 1..22: mol_type = other RNA
cagaaatttccttcttcatcca

SEQ ID NO: 18991 - RNA, 22 nt, synthetic construct
  source 1..22: mol_type = other RNA
ccttcttcatccaagggacttt

SEQ ID NO: 18992 - RNA, 22 nt, synthetic construct
  source 1..22: mol_type = other RNA
cttcttcatccaagggactttt

SEQ ID NO: 18993 - RNA, 22 nt, synthetic construct
  source 1..22: mol_type = other RNA
cctcccagaacccgacacagac

SEQ ID NO: 18994 - RNA, 22 nt, synthetic construct
  source 1..22: mol_type = other RNA
ctcccagaacccgacacagaca

SEQ ID NO: 18995 - RNA, 22 nt, synthetic construct
  source 1..22: mol_type = other RNA
agcaggctgttgtgtgacatgg

SEQ ID NO: 18996 - RNA, 22 nt, synthetic construct
  source 1..22: mol_type = other RNA
tgtgacatggaaggtgatgaag

SEQ ID NO: 18997 - RNA, 22 nt, synthetic construct
  source 1..22: mol_type = other RNA
tttgctgccacttgtcaatatc

SEQ ID NO: 18998 - RNA, 22 nt, synthetic construct
  source 1..22: mol_type = other RNA
ctgccacttgtcaatatcaccc

SEQ ID NO: 18999 - RNA, 22 nt, synthetic construct
  source 1..22: mol_type = other RNA
atcatgagccacgtcagtcccc

SEQ ID NO: 19000 - RNA, 22 nt, synthetic construct
  source 1..22: mol_type = other RNA
caagggggatgcggagcaatgg

SEQ ID NO: 19001 - RNA, 22 nt, synthetic construct
  source 1..22: mol_type = other RNA
acatcctccacctccatttcta

SEQ ID NO: 19002 - RNA, 22 nt, synthetic construct
  source 1..22: mol_type = other RNA
catcctccacctccatttctat

SEQ ID NO: 19003 - RNA, 22 nt, synthetic construct
  source 1..22: mol_type = other RNA
ctatacgcatttctgcttcttg

SEQ ID NO: 19004 - RNA, 22 nt, synthetic construct
  source 1..22: mol_type = other RNA
tatacgcatttctgcttcttgc

SEQ ID NO: 19005 - RNA, 22 nt, synthetic construct
  source 1..22: mol_type = other RNA
ctgcttcttgctcttctgtcca

SEQ ID NO: 19006 - RNA, 22 nt, synthetic construct
  source 1..22: mol_type = other RNA
tgcttcttgctcttctgtccat

SEQ ID NO: 19007 - RNA, 22 nt, synthetic construct
  source 1..22: mol_type = other RNA
tacaaagcccataccatacacc

SEQ ID NO: 19008 - RNA, 22 nt, synthetic construct
  source 1..22: mol_type = other RNA
ccttttcctcccagctccttag

SEQ ID NO: 19009 - RNA, 22 nt, synthetic construct
  source 1..22: mol_type = other RNA
cctcccagctccttagccaagc

SEQ ID NO: 19010 - RNA, 22 nt, synthetic construct
  source 1..22: mol_type = other RNA
ctcccagctccttagccaagct

SEQ ID NO: 19011 - RNA, 22 nt, synthetic construct
  source 1..22: mol_type = other RNA
gtaataactagcatttactgga

SEQ ID NO: 19012 - RNA, 22 nt, synthetic construct
  source 1..22: mol_type = other RNA
taataactagcatttactggat

SEQ ID NO: 19013 - RNA, 22 nt, synthetic construct
  source 1..22: mol_type = other RNA
actggatactcatagtatgctc

SEQ ID NO: 19014 - RNA, 22 nt, synthetic construct
  source 1..22: mol_type = other RNA
ctggatactcatagtatgctca

SEQ ID NO: 19015 - RNA, 22 nt, synthetic construct
  source 1..22: mol_type = other RNA
ctgtccatacattatcatctgg

SEQ ID NO: 19016 - RNA, 22 nt, synthetic construct
  source 1..22: mol_type = other RNA
tcatctggaatccttacaacaa

SEQ ID NO: 19017 - RNA, 22 nt, synthetic construct
  source 1..22: mol_type = other RNA
ttagtttctgtcttttacaaat

SEQ ID NO: 19018 - RNA, 22 nt, synthetic construct
  source 1..22: mol_type = other RNA
gtttctgtcttttacaaatgag

SEQ ID NO: 19019 - RNA, 22 nt, synthetic construct
  source 1..22: mol_type = other RNA
ctgtcttttacaaatgaggaaa

SEQ ID NO: 19020 - RNA, 22 nt, synthetic construct
  source 1..22: mol_type = other RNA
tgtcttttacaaatgaggaaat

SEQ ID NO: 19021 - RNA, 22 nt, synthetic construct
  source 1..22: mol_type = other RNA
acaaatgaggaaattgaggttt

SEQ ID NO: 19022 - RNA, 22 nt, synthetic construct
  source 1..22: mol_type = other RNA
caaatgaggaaattgaggttta

SEQ ID NO: 19023 - RNA, 22 nt, synthetic construct
  source 1..22: mol_type = other RNA
aggtttagagaggtgaaacgac

SEQ ID NO: 19024 - RNA, 22 nt, synthetic construct
  source 1..22: mol_type = other RNA
agagaggtgaaacgacctaccc

SEQ ID NO: 19025 - RNA, 22 nt, synthetic construct
  source 1..22: mol_type = other RNA
gagaggtgaaacgacctaccca

SEQ ID NO: 19026 - RNA, 22 nt, synthetic construct
  source 1..22: mol_type = other RNA
gcattagagatagtaatgtaca

SEQ ID NO: 19027 - RNA, 22 nt, synthetic construct
  source 1..22: mol_type = other RNA
cattagagatagtaatgtacag

SEQ ID NO: 19028 - RNA, 22 nt, synthetic construct
  source 1..22: mol_type = other RNA
gagatagtaatgtacagatctg

SEQ ID NO: 19029 - RNA, 22 nt, synthetic construct
  source 1..22: mol_type = other RNA
taacctaggtctttctcgtttc

SEQ ID NO: 19030 - RNA, 22 nt, synthetic construct
  source 1..22: mol_type = other RNA
tcgtttcaaagtctccattttt

SEQ ID NO: 19031 - RNA, 22 nt, synthetic construct
  source 1..22: mol_type = other RNA
caaagtctccatttttaaccac

SEQ ID NO: 19032 - RNA, 22 nt, synthetic construct
  source 1..22: mol_type = other RNA
aaagtctccatttttaaccaca

SEQ ID NO: 19033 - RNA, 22 nt, synthetic construct
  source 1..22: mol_type = other RNA
ttaaccacaaaaaaagaaagtg

SEQ ID NO: 19034 - RNA, 22 nt, synthetic construct
  source 1..22: mol_type = other RNA
taaccacaaaaaaagaaagtgt

SEQ ID NO: 19035 - RNA, 22 nt, synthetic construct
  source 1..22: mol_type = other RNA
aaccacaaaaaaagaaagtgtc

SEQ ID NO: 19036 - RNA, 22 nt, synthetic construct
  source 1..22: mol_type = other RNA
accacaaaaaaagaaagtgtct

SEQ ID NO: 19037 - RNA, 22 nt, synthetic construct
  source 1..22: mol_type = other RNA
gaagatttgctaaggcttaagc

SEQ ID NO: 19038 - RNA, 22 nt, synthetic construct
  source 1..22: mol_type = other RNA
gctaaggcttaagcagagaagc

SEQ ID NO: 19039 - RNA, 22 nt, synthetic construct
  source 1..22: mol_type = other RNA
ctaaggcttaagcagagaagct

SEQ ID NO: 19040 - RNA, 22 nt, synthetic construct
  source 1..22: mol_type = other RNA
gtagccttaagaagagctacag

SEQ ID NO: 19041 - RNA, 22 nt, synthetic construct
  source 1..22: mol_type = other RNA
tagccttaagaagagctacagc

SEQ ID NO: 19042 - RNA, 22 nt, synthetic construct
  source 1..22: mol_type = other RNA
agacaagggcaggactcttggg

SEQ ID NO: 19043 - RNA, 22 nt, synthetic construct
  source 1..22: mol_type = other RNA
ctgctagtggtttgttttttgg

SEQ ID NO: 19044 - RNA, 22 nt, synthetic construct
  source 1..22: mol_type = other RNA
gttttttgggggagagacgtgg

SEQ ID NO: 19045 - RNA, 22 nt, synthetic construct
  source 1..22: mol_type = other RNA
ttttttgggggagagacgtggg

SEQ ID NO: 19046 - RNA, 22 nt, synthetic construct
  source 1..22: mol_type = other RNA
tttgggggagagacgtgggata

SEQ ID NO: 19047 - RNA, 22 nt, synthetic construct
  source 1..22: mol_type = other RNA
ttgggggagagacgtgggatag

SEQ ID NO: 19048 - RNA, 22 nt, synthetic construct
  source 1..22: mol_type = other RNA
tgggggagagacgtgggataga

SEQ ID NO: 19049 - RNA, 22 nt, synthetic construct
  source 1..22: mol_type = other RNA
gggggagagacgtgggatagag

SEQ ID NO: 19050 - RNA, 22 nt, synthetic construct
  source 1..22: mol_type = other RNA
ggggagagacgtgggatagaga

SEQ ID NO: 19051 - RNA, 22 nt, synthetic construct
  source 1..22: mol_type = other RNA
aaatagaaaaaagtggcctttt

SEQ ID NO: 19052 - RNA, 22 nt, synthetic construct
  source 1..22: mol_type = other RNA
tctggaggatgcagcccctacc

SEQ ID NO: 19053 - RNA, 22 nt, synthetic construct
  source 1..22: mol_type = other RNA
ctggaggatgcagcccctacca

SEQ ID NO: 19054 - RNA, 22 nt, synthetic construct
  source 1..22: mol_type = other RNA
tggaggatgcagcccctaccag

SEQ ID NO: 19055 - RNA, 22 nt, synthetic construct
  source 1..22: mol_type = other RNA
tccttgttggcttgggcacctg

SEQ ID NO: 19056 - RNA, 22 nt, synthetic construct
  source 1..22: mol_type = other RNA
ccttgttggcttgggcacctgt

SEQ ID NO: 19057 - RNA, 22 nt, synthetic construct
  source 1..22: mol_type = other RNA
cttgttggcttgggcacctgtg

SEQ ID NO: 19058 - RNA, 22 nt, synthetic construct
  source 1..22: mol_type = other RNA
gcttgggcacctgtgtgcagtg

SEQ ID NO: 19059 - RNA, 22 nt, synthetic construct
  source 1..22: mol_type = other RNA
agcagttctgtgcttgatccaa

SEQ ID NO: 19060 - RNA, 22 nt, synthetic construct
  source 1..22: mol_type = other RNA
tgtgcttgatccaaatgtggcc

SEQ ID NO: 19061 - RNA, 22 nt, synthetic construct
  source 1..22: mol_type = other RNA
ttccccagagcacagtgtattg

SEQ ID NO: 19062 - RNA, 22 nt, synthetic construct
  source 1..22: mol_type = other RNA
tccccagagcacagtgtattga

SEQ ID NO: 19063 - RNA, 22 nt, synthetic construct
  source 1..22: mol_type = other RNA
ccccagagcacagtgtattgaa

SEQ ID NO: 19064 - RNA, 22 nt, synthetic construct
  source 1..22: mol_type = other RNA
cccagagcacagtgtattgaaa

SEQ ID NO: 19065 - RNA, 22 nt, synthetic construct
  source 1..22: mol_type = other RNA
aaaatcataccaaggaagaaaa

SEQ ID NO: 19066 - RNA, 22 nt, synthetic construct
  source 1..22: mol_type = other RNA
ttcatgtttcagaaattacaga

SEQ ID NO: 19067 - RNA, 22 nt, synthetic construct
  source 1..22: mol_type = other RNA
atgtttcagaaattacagaact

SEQ ID NO: 19068 - RNA, 22 nt, synthetic construct
  source 1..22: mol_type = other RNA
cagaaattacagaactgagagc

SEQ ID NO: 19069 - RNA, 22 nt, synthetic construct
  source 1..22: mol_type = other RNA
agaaattacagaactgagagct

SEQ ID NO: 19070 - RNA, 22 nt, synthetic construct
  source 1..22: mol_type = other RNA
cagaactgagagcttgactgct

SEQ ID NO: 19071 - RNA, 22 nt, synthetic construct
  source 1..22: mol_type = other RNA
acatgggggaagcagaagtgat

SEQ ID NO: 19072 - RNA, 22 nt, synthetic construct
  source 1..22: mol_type = other RNA
catgggggaagcagaagtgatt

SEQ ID NO: 19073 - RNA, 22 nt, synthetic construct
  source 1..22: mol_type = other RNA
gggctgaggacattcacatttc

SEQ ID NO: 19074 - RNA, 22 nt, synthetic construct
  source 1..22: mol_type = other RNA
acatttcctcacaactggaggc

SEQ ID NO: 19075 - RNA, 22 nt, synthetic construct
  source 1..22: mol_type = other RNA
cctcacaactggaggcagtcat

SEQ ID NO: 19076 - RNA, 22 nt, synthetic construct
  source 1..22: mol_type = other RNA
ctcacaactggaggcagtcatt

SEQ ID NO: 19077 - RNA, 22 nt, synthetic construct
  source 1..22: mol_type = other RNA
aggatttgggcatgtcatagga

SEQ ID NO: 19078 - RNA, 22 nt, synthetic construct
  source 1..22: mol_type = other RNA
gggcatgtcataggatttgggt

SEQ ID NO: 19079 - RNA, 22 nt, synthetic construct
  source 1..22: mol_type = other RNA
ggcatgtcataggatttgggtg

SEQ ID NO: 19080 - RNA, 22 nt, synthetic construct
  source 1..22: mol_type = other RNA
gggtgtttttctccccccttag

SEQ ID NO: 19081 - RNA, 22 nt, synthetic construct
  source 1..22: mol_type = other RNA
ggtgtttttctccccccttagt

SEQ ID NO: 19082 - RNA, 22 nt, synthetic construct
  source 1..22: mol_type = other RNA
ttctccccccttagtggcatct

SEQ ID NO: 19083 - RNA, 22 nt, synthetic construct
  source 1..22: mol_type = other RNA
tctccccccttagtggcatctc

SEQ ID NO: 19084 - RNA, 22 nt, synthetic construct
  source 1..22: mol_type = other RNA
ctccccccttagtggcatctcc

SEQ ID NO: 19085 - RNA, 22 nt, synthetic construct
  source 1..22: mol_type = other RNA
tccccccttagtggcatctcca

SEQ ID NO: 19086 - RNA, 22 nt, synthetic construct
  source 1..22: mol_type = other RNA
gtccattttttgttgcttaaaa

SEQ ID NO: 19087 - RNA, 22 nt, synthetic construct
  source 1..22: mol_type = other RNA
tttgttgcttaaaacaacatac

SEQ ID NO: 19088 - RNA, 22 nt, synthetic construct
  source 1..22: mol_type = other RNA
ttgttgcttaaaacaacatacc

SEQ ID NO: 19089 - RNA, 22 nt, synthetic construct
  source 1..22: mol_type = other RNA
tgttgcttaaaacaacatacct

SEQ ID NO: 19090 - RNA, 22 nt, synthetic construct
  source 1..22: mol_type = other RNA
gttgcttaaaacaacatacctg

SEQ ID NO: 19091 - RNA, 22 nt, synthetic construct
  source 1..22: mol_type = other RNA
ttgcttaaaacaacatacctga

SEQ ID NO: 19092 - RNA, 22 nt, synthetic construct
  source 1..22: mol_type = other RNA
cttaaaacaacatacctgacac

SEQ ID NO: 19093 - RNA, 22 nt, synthetic construct
  source 1..22: mol_type = other RNA
ataaagaaaaaaaatatttctt

SEQ ID NO: 19094 - RNA, 22 nt, synthetic construct
  source 1..22: mol_type = other RNA
taaagaaaaaaaatatttctta

SEQ ID NO: 19095 - RNA, 22 nt, synthetic construct
  source 1..22: mol_type = other RNA
cttacagttatggaggctgaga

SEQ ID NO: 19096 - RNA, 22 nt, synthetic construct
  source 1..22: mol_type = other RNA
ttacagttatggaggctgagaa

SEQ ID NO: 19097 - RNA, 22 nt, synthetic construct
  source 1..22: mol_type = other RNA
tggaggctgagaagtccaaggt

SEQ ID NO: 19098 - RNA, 22 nt, synthetic construct
  source 1..22: mol_type = other RNA
ggggctgcatctggtgagggcc

SEQ ID NO: 19099 - RNA, 22 nt, synthetic construct
  source 1..22: mol_type = other RNA
cggtgtgatagtctctcttcct

SEQ ID NO: 19100 - RNA, 22 nt, synthetic construct
  source 1..22: mol_type = other RNA
ggtgtgatagtctctcttcctc

SEQ ID NO: 19101 - RNA, 22 nt, synthetic construct
  source 1..22: mol_type = other RNA
acttattaacctgtttatccac

SEQ ID NO: 19102 - RNA, 22 nt, synthetic construct
  source 1..22: mol_type = other RNA
acctgtttatccactaatccat

SEQ ID NO: 19103 - RNA, 22 nt, synthetic construct
  source 1..22: mol_type = other RNA
atccactaatccatgaacggat

SEQ ID NO: 19104 - RNA, 22 nt, synthetic construct
  source 1..22: mol_type = other RNA
tccactaatccatgaacggatt

SEQ ID NO: 19105 - RNA, 22 nt, synthetic construct
  source 1..22: mol_type = other RNA
acccattcatcaaggaaaagcc

SEQ ID NO: 19106 - RNA, 22 nt, synthetic construct
  source 1..22: mol_type = other RNA
atcaaggaaaagccccagtcac

SEQ ID NO: 19107 - RNA, 22 nt, synthetic construct
  source 1..22: mol_type = other RNA
catttatacatgagttttggag

SEQ ID NO: 19108 - RNA, 22 nt, synthetic construct
  source 1..22: mol_type = other RNA
atacatgagttttggagaagac

SEQ ID NO: 19109 - RNA, 22 nt, synthetic construct
  source 1..22: mol_type = other RNA
tacatgagttttggagaagaca

SEQ ID NO: 19110 - RNA, 22 nt, synthetic construct
  source 1..22: mol_type = other RNA
tggagaagacaaacattcacgt

SEQ ID NO: 19111 - RNA, 22 nt, synthetic construct
  source 1..22: mol_type = other RNA
ggagaagacaaacattcacgtc

SEQ ID NO: 19112 - RNA, 22 nt, synthetic construct
  source 1..22: mol_type = other RNA
gagaagacaaacattcacgtca

SEQ ID NO: 19113 - RNA, 22 nt, synthetic construct
  source 1..22: mol_type = other RNA
acgtcataacaggcagcttcac

SEQ ID NO: 19114 - RNA, 22 nt, synthetic construct
  source 1..22: mol_type = other RNA
tctctctgcttctggaaggtga

SEQ ID NO: 19115 - RNA, 22 nt, synthetic construct
  source 1..22: mol_type = other RNA
ctctctgcttctggaaggtgaa

SEQ ID NO: 19116 - RNA, 22 nt, synthetic construct
  source 1..22: mol_type = other RNA
tctctgcttctggaaggtgaag

SEQ ID NO: 19117 - RNA, 22 nt, synthetic construct
  source 1..22: mol_type = other RNA
ttttgcagcatcctgaaatatg

SEQ ID NO: 19118 - RNA, 22 nt, synthetic construct
  source 1..22: mol_type = other RNA
gcagcatcctgaaatatgacct

SEQ ID NO: 19119 - RNA, 22 nt, synthetic construct
  source 1..22: mol_type = other RNA
cagcatcctgaaatatgacctt

SEQ ID NO: 19120 - RNA, 22 nt, synthetic construct
  source 1..22: mol_type = other RNA
taagactgaataagttacaatg

SEQ ID NO: 19121 - RNA, 22 nt, synthetic construct
  source 1..22: mol_type = other RNA
caatgtgtaaagcatttagaaa

SEQ ID NO: 19122 - RNA, 22 nt, synthetic construct
  source 1..22: mol_type = other RNA
agaaaaggaatttgcacagagt

SEQ ID NO: 19123 - RNA, 22 nt, synthetic construct
  source 1..22: mol_type = other RNA
gaaaaggaatttgcacagagta

SEQ ID NO: 19124 - RNA, 22 nt, synthetic construct
  source 1..22: mol_type = other RNA
gcacagagtaagcattcagtag

SEQ ID NO: 19125 - RNA, 22 nt, synthetic construct
  source 1..22: mol_type = other RNA
cacagagtaagcattcagtaga

SEQ ID NO: 19126 - RNA, 22 nt, synthetic construct
  source 1..22: mol_type = other RNA
agtagatgttaggtactacccc

SEQ ID NO: 19127 - RNA, 22 nt, synthetic construct
  source 1..22: mol_type = other RNA
ggtactaccccacaaccaccgt

SEQ ID NO: 19128 - RNA, 22 nt, synthetic construct
  source 1..22: mol_type = other RNA
tcattattatcaccatcattat

SEQ ID NO: 19129 - RNA, 22 nt, synthetic construct
  source 1..22: mol_type = other RNA
ttatcaccatcattattatcat

SEQ ID NO: 19130 - RNA, 22 nt, synthetic construct
  source 1..22: mol_type = other RNA
tcaccatcattattatcatctt

SEQ ID NO: 19131 - RNA, 22 nt, synthetic construct
  source 1..22: mol_type = other RNA
ttatcatcttcattttcatcac

SEQ ID NO: 19132 - RNA, 22 nt, synthetic construct
  source 1..22: mol_type = other RNA
tcatcttcattttcatcacctt

SEQ ID NO: 19133 - RNA, 22 nt, synthetic construct
  source 1..22: mol_type = other RNA
tcatcaccttcattatggccat

SEQ ID NO: 19134 - RNA, 22 nt, synthetic construct
  source 1..22: mol_type = other RNA
catcaccttcattatggccatc

SEQ ID NO: 19135 - RNA, 22 nt, synthetic construct
  source 1..22: mol_type = other RNA
atcaccttcattatggccatca

SEQ ID NO: 19136 - RNA, 22 nt, synthetic construct
  source 1..22: mol_type = other RNA
tggccatcattccattcctcag

SEQ ID NO: 19137 - RNA, 22 nt, synthetic construct
  source 1..22: mol_type = other RNA
cattcctcagctcagaagcctt

SEQ ID NO: 19138 - RNA, 22 nt, synthetic construct
  source 1..22: mol_type = other RNA
ctcagctcagaagccttctatg

SEQ ID NO: 19139 - RNA, 22 nt, synthetic construct
  source 1..22: mol_type = other RNA
cttataaaatcaagtcctaact

SEQ ID NO: 19140 - RNA, 22 nt, synthetic construct
  source 1..22: mol_type = other RNA
cccagcatgaaacttctaccac

SEQ ID NO: 19141 - RNA, 22 nt, synthetic construct
  source 1..22: mol_type = other RNA
cctaaacatactctgaacaagt

SEQ ID NO: 19142 - RNA, 22 nt, synthetic construct
  source 1..22: mol_type = other RNA
ctaaacatactctgaacaagtt

SEQ ID NO: 19143 - RNA, 22 nt, synthetic construct
  source 1..22: mol_type = other RNA
cctcactctgccactgtgaccc

SEQ ID NO: 19144 - RNA, 22 nt, synthetic construct
  source 1..22: mol_type = other RNA
ctcactctgccactgtgaccca

SEQ ID NO: 19145 - RNA, 22 nt, synthetic construct
  source 1..22: mol_type = other RNA
tccttctcccagactctgcctc

SEQ ID NO: 19146 - RNA, 22 nt, synthetic construct
  source 1..22: mol_type = other RNA
aaggcctggttccaggatccct

SEQ ID NO: 19147 - RNA, 22 nt, synthetic construct
  source 1..22: mol_type = other RNA
caggatcccttcctccaggaag

SEQ ID NO: 19148 - RNA, 22 nt, synthetic construct
  source 1..22: mol_type = other RNA
ccctattccaccatacaccttt

SEQ ID NO: 19149 - RNA, 22 nt, synthetic construct
  source 1..22: mol_type = other RNA
caccatacaccttttttctcgg

SEQ ID NO: 19150 - RNA, 22 nt, synthetic construct
  source 1..22: mol_type = other RNA
ttctcggacttcatgtcatggt

SEQ ID NO: 19151 - RNA, 22 nt, synthetic construct
  source 1..22: mol_type = other RNA
tctcggacttcatgtcatggtg

SEQ ID NO: 19152 - RNA, 22 nt, synthetic construct
  source 1..22: mol_type = other RNA
ctcggacttcatgtcatggtgc

SEQ ID NO: 19153 - RNA, 22 nt, synthetic construct
  source 1..22: mol_type = other RNA
tcggacttcatgtcatggtgcc

SEQ ID NO: 19154 - RNA, 22 nt, synthetic construct
  source 1..22: mol_type = other RNA
caagggctctgagccatgtacc

SEQ ID NO: 19155 - RNA, 22 nt, synthetic construct
  source 1..22: mol_type = other RNA
tatagttaccactatttactga

SEQ ID NO: 19156 - RNA, 22 nt, synthetic construct
  source 1..22: mol_type = other RNA
ccactatttactgagtgcctac

SEQ ID NO: 19157 - RNA, 22 nt, synthetic construct
  source 1..22: mol_type = other RNA
actgagtgcctactgtatacca

SEQ ID NO: 19158 - RNA, 22 nt, synthetic construct
  source 1..22: mol_type = other RNA
ctgagtgcctactgtataccag

SEQ ID NO: 19159 - RNA, 22 nt, synthetic construct
  source 1..22: mol_type = other RNA
gatgctctagatgtagaacctc

SEQ ID NO: 19160 - RNA, 22 nt, synthetic construct
  source 1..22: mol_type = other RNA
tcaccatcgattcctgggtagt

SEQ ID NO: 19161 - RNA, 22 nt, synthetic construct
  source 1..22: mol_type = other RNA
ctgggtagtaggcattatttat

SEQ ID NO: 19162 - RNA, 22 nt, synthetic construct
  source 1..22: mol_type = other RNA
tttattcatcttacacagatga

SEQ ID NO: 19163 - RNA, 22 nt, synthetic construct
  source 1..22: mol_type = other RNA
attcatcttacacagatgagaa

SEQ ID NO: 19164 - RNA, 22 nt, synthetic construct
  source 1..22: mol_type = other RNA
ttcatcttacacagatgagaaa

SEQ ID NO: 19165 - RNA, 22 nt, synthetic construct
  source 1..22: mol_type = other RNA
atcttacacagatgagaaaatg

SEQ ID NO: 19166 - RNA, 22 nt, synthetic construct
  source 1..22: mol_type = other RNA
aataagtagcccaagattgcac

SEQ ID NO: 19167 - RNA, 22 nt, synthetic construct
  source 1..22: mol_type = other RNA
cacagctagtagggctagtgga

SEQ ID NO: 19168 - RNA, 22 nt, synthetic construct
  source 1..22: mol_type = other RNA
gaactcaaatcctgcagtaact

SEQ ID NO: 19169 - RNA, 22 nt, synthetic construct
  source 1..22: mol_type = other RNA
aactcaaatcctgcagtaactc

SEQ ID NO: 19170 - RNA, 22 nt, synthetic construct
  source 1..22: mol_type = other RNA
tgccttgctcttctttgtagca

SEQ ID NO: 19171 - RNA, 22 nt, synthetic construct
  source 1..22: mol_type = other RNA
tagcagtagataagttttcatg

SEQ ID NO: 19172 - RNA, 22 nt, synthetic construct
  source 1..22: mol_type = other RNA
tcatggatacatacctcatcct

SEQ ID NO: 19173 - RNA, 22 nt, synthetic construct
  source 1..22: mol_type = other RNA
catggatacatacctcatcctt

SEQ ID NO: 19174 - RNA, 22 nt, synthetic construct
  source 1..22: mol_type = other RNA
atggatacatacctcatccttt

SEQ ID NO: 19175 - RNA, 22 nt, synthetic construct
  source 1..22: mol_type = other RNA
gattagattaagggcccctgga

SEQ ID NO: 19176 - RNA, 22 nt, synthetic construct
  source 1..22: mol_type = other RNA
attagattaagggcccctggag

SEQ ID NO: 19177 - RNA, 22 nt, synthetic construct
  source 1..22: mol_type = other RNA
gattaagggcccctggagtgtc

SEQ ID NO: 19178 - RNA, 22 nt, synthetic construct
  source 1..22: mol_type = other RNA
agggcccctggagtgtcagtgt

SEQ ID NO: 19179 - RNA, 22 nt, synthetic construct
  source 1..22: mol_type = other RNA
attcatttgtttgatcattcat

SEQ ID NO: 19180 - RNA, 22 nt, synthetic construct
  source 1..22: mol_type = other RNA
atttgtttgatcattcattcat

SEQ ID NO: 19181 - RNA, 22 nt, synthetic construct
  source 1..22: mol_type = other RNA
gtttgatcattcattcattcaa

SEQ ID NO: 19182 - RNA, 22 nt, synthetic construct
  source 1..22: mol_type = other RNA
tttgatcattcattcattcaac

SEQ ID NO: 19183 - RNA, 22 nt, synthetic construct
  source 1..22: mol_type = other RNA
gatcattcattcattcaacaaa

SEQ ID NO: 19184 - RNA, 22 nt, synthetic construct
  source 1..22: mol_type = other RNA
atcattcattcattcaacaaac

SEQ ID NO: 19185 - RNA, 22 nt, synthetic construct
  source 1..22: mol_type = other RNA
attcattcaacaaacatttctt

SEQ ID NO: 19186 - RNA, 22 nt, synthetic construct
  source 1..22: mol_type = other RNA
attcaacaaacatttcttgagt

SEQ ID NO: 19187 - RNA, 22 nt, synthetic construct
  source 1..22: mol_type = other RNA
aacaaacatttcttgagtcccc

SEQ ID NO: 19188 - RNA, 22 nt, synthetic construct
  source 1..22: mol_type = other RNA
cttgagtccccactgtgtgcca

SEQ ID NO: 19189 - RNA, 22 nt, synthetic construct
  source 1..22: mol_type = other RNA
ttgagtccccactgtgtgccag

SEQ ID NO: 19190 - RNA, 22 nt, synthetic construct
  source 1..22: mol_type = other RNA
cccagcccaaggcctggcacac

SEQ ID NO: 19191 - RNA, 22 nt, synthetic construct
  source 1..22: mol_type = other RNA
gaccttgttgattgactgcgct

SEQ ID NO: 19192 - RNA, 22 nt, synthetic construct
  source 1..22: mol_type = other RNA
attgactgcgcttttccttgtc

SEQ ID NO: 19193 - RNA, 22 nt, synthetic construct
  source 1..22: mol_type = other RNA
actgcgcttttccttgtctggg

SEQ ID NO: 19194 - RNA, 22 nt, synthetic construct
  source 1..22: mol_type = other RNA
ccttgtctgggcagcggaactg

SEQ ID NO: 19195 - RNA, 22 nt, synthetic construct
  source 1..22: mol_type = other RNA
cttgtctgggcagcggaactgg

SEQ ID NO: 19196 - RNA, 22 nt, synthetic construct
  source 1..22: mol_type = other RNA
tcagtaagtttgtggtgggtgg

SEQ ID NO: 19197 - RNA, 22 nt, synthetic construct
  source 1..22: mol_type = other RNA
cagtaagtttgtggtgggtggg

SEQ ID NO: 19198 - RNA, 22 nt, synthetic construct
  source 1..22: mol_type = other RNA
agtaagtttgtggtgggtgggg

SEQ ID NO: 19199 - RNA, 22 nt, synthetic construct
  source 1..22: mol_type = other RNA
gtggtgggtggggaggtcttgg

SEQ ID NO: 19200 - RNA, 22 nt, synthetic construct
  source 1..22: mol_type = other RNA
tggtgggtggggaggtcttggc

SEQ ID NO: 19201 - RNA, 22 nt, synthetic construct
  source 1..22: mol_type = other RNA
cctgccttgttccctggggggt

SEQ ID NO: 19202 - RNA, 22 nt, synthetic construct
  source 1..22: mol_type = other RNA
ctgccttgttccctggggggtg

SEQ ID NO: 19203 - RNA, 22 nt, synthetic construct
  source 1..22: mol_type = other RNA
cctggggggtgccctaatacct

SEQ ID NO: 19204 - RNA, 22 nt, synthetic construct
  source 1..22: mol_type = other RNA
attgatgggcagtcagacccct

SEQ ID NO: 19205 - RNA, 22 nt, synthetic construct
  source 1..22: mol_type = other RNA
atgggcagtcagacccctctcc

SEQ ID NO: 19206 - RNA, 22 nt, synthetic construct
  source 1..22: mol_type = other RNA
attgattgtgtgagttggtctc

SEQ ID NO: 19207 - RNA, 22 nt, synthetic construct
  source 1..22: mol_type = other RNA
attgtgtgagttggtctctggt

SEQ ID NO: 19208 - RNA, 22 nt, synthetic construct
  source 1..22: mol_type = other RNA
tgtgagttggtctctggttttt

SEQ ID NO: 19209 - RNA, 22 nt, synthetic construct
  source 1..22: mol_type = other RNA
gtctctggtttttctcaaagta

SEQ ID NO: 19210 - RNA, 22 nt, synthetic construct
  source 1..22: mol_type = other RNA
ttctcaaagtagagcacatagg

SEQ ID NO: 19211 - RNA, 22 nt, synthetic construct
  source 1..22: mol_type = other RNA
tctcaaagtagagcacatagga

SEQ ID NO: 19212 - RNA, 22 nt, synthetic construct
  source 1..22: mol_type = other RNA
ctcaaagtagagcacataggac

SEQ ID NO: 19213 - RNA, 22 nt, synthetic construct
  source 1..22: mol_type = other RNA
tcaaagtagagcacataggacc

SEQ ID NO: 19214 - RNA, 22 nt, synthetic construct
  source 1..22: mol_type = other RNA
ggcagaaaagtcagaaaagacg

SEQ ID NO: 19215 - RNA, 22 nt, synthetic construct
  source 1..22: mol_type = other RNA
cttgactccaaagcctgctgtg

SEQ ID NO: 19216 - RNA, 22 nt, synthetic construct
  source 1..22: mol_type = other RNA
ggaggccctttaaaagccaaca

SEQ ID NO: 19217 - RNA, 22 nt, synthetic construct
  source 1..22: mol_type = other RNA
aaagccaacaggagccttaaaa

SEQ ID NO: 19218 - RNA, 22 nt, synthetic construct
  source 1..22: mol_type = other RNA
tttcatggccctgataaccctc

SEQ ID NO: 19219 - RNA, 22 nt, synthetic construct
  source 1..22: mol_type = other RNA
catggccctgataaccctccaa

SEQ ID NO: 19220 - RNA, 22 nt, synthetic construct
  source 1..22: mol_type = other RNA
atggccctgataaccctccaat

SEQ ID NO: 19221 - RNA, 22 nt, synthetic construct
  source 1..22: mol_type = other RNA
aagcctcggggcctttgcagtt

SEQ ID NO: 19222 - RNA, 22 nt, synthetic construct
  source 1..22: mol_type = other RNA
cagttgctatagtctctatctg

SEQ ID NO: 19223 - RNA, 22 nt, synthetic construct
  source 1..22: mol_type = other RNA
ctatagtctctatctggaatgc

SEQ ID NO: 19224 - RNA, 22 nt, synthetic construct
  source 1..22: mol_type = other RNA
ttcccatggctgactcctttga

SEQ ID NO: 19225 - RNA, 22 nt, synthetic construct
  source 1..22: mol_type = other RNA
aatctttctggtgttggctaaa

SEQ ID NO: 19226 - RNA, 22 nt, synthetic construct
  source 1..22: mol_type = other RNA
tggtgttggctaaactgtcacc

SEQ ID NO: 19227 - RNA, 22 nt, synthetic construct
  source 1..22: mol_type = other RNA
gctaaactgtcacctcttcctg

SEQ ID NO: 19228 - RNA, 22 nt, synthetic construct
  source 1..22: mol_type = other RNA
gctcagttattctcaccttgtg

SEQ ID NO: 19229 - RNA, 22 nt, synthetic construct
  source 1..22: mol_type = other RNA
ttctcaccttgtgtgtcttttt

SEQ ID NO: 19230 - RNA, 22 nt, synthetic construct
  source 1..22: mol_type = other RNA
tcaccttgtgtgtctttttcct

SEQ ID NO: 19231 - RNA, 22 nt, synthetic construct
  source 1..22: mol_type = other RNA
tccttgcagtttagcactcatt

SEQ ID NO: 19232 - RNA, 22 nt, synthetic construct
  source 1..22: mol_type = other RNA
ccttgcagtttagcactcatta

SEQ ID NO: 19233 - RNA, 22 nt, synthetic construct
  source 1..22: mol_type = other RNA
cttgcagtttagcactcattac

SEQ ID NO: 19234 - RNA, 22 nt, synthetic construct
  source 1..22: mol_type = other RNA
agcactcattaccatctggaca

SEQ ID NO: 19235 - RNA, 22 nt, synthetic construct
  source 1..22: mol_type = other RNA
gcactcattaccatctggacat

SEQ ID NO: 19236 - RNA, 22 nt, synthetic construct
  source 1..22: mol_type = other RNA
ccatctggacatattttacgcc

SEQ ID NO: 19237 - RNA, 22 nt, synthetic construct
  source 1..22: mol_type = other RNA
tacgccttgctctcccactgtg

SEQ ID NO: 19238 - RNA, 22 nt, synthetic construct
  source 1..22: mol_type = other RNA
acgccttgctctcccactgtga

SEQ ID NO: 19239 - RNA, 22 nt, synthetic construct
  source 1..22: mol_type = other RNA
cgccttgctctcccactgtgag

SEQ ID NO: 19240 - RNA, 22 nt, synthetic construct
  source 1..22: mol_type = other RNA
ttgctcgtgactgtttccccag

SEQ ID NO: 19241 - RNA, 22 nt, synthetic construct
  source 1..22: mol_type = other RNA
ccccagcatctagtgcagtgcc

SEQ ID NO: 19242 - RNA, 22 nt, synthetic construct
  source 1..22: mol_type = other RNA
cccagcatctagtgcagtgcct

SEQ ID NO: 19243 - RNA, 22 nt, synthetic construct
  source 1..22: mol_type = other RNA
aatgaaaacatctgtaaaatgg

SEQ ID NO: 19244 - RNA, 22 nt, synthetic construct
  source 1..22: mol_type = other RNA
actgagtacttattatgggtct

SEQ ID NO: 19245 - RNA, 22 nt, synthetic construct
  source 1..22: mol_type = other RNA
tgggtctgaccatgtgtaagtc

SEQ ID NO: 19246 - RNA, 22 nt, synthetic construct
  source 1..22: mol_type = other RNA
attcagttcttaaacaggtgaa

SEQ ID NO: 19247 - RNA, 22 nt, synthetic construct
  source 1..22: mol_type = other RNA
ttcagttcttaaacaggtgaat

SEQ ID NO: 19248 - RNA, 22 nt, synthetic construct
  source 1..22: mol_type = other RNA
agttcttaaacaggtgaatcgc

SEQ ID NO: 19249 - RNA, 22 nt, synthetic construct
  source 1..22: mol_type = other RNA
ttaaacaggtgaatcgcacaca

SEQ ID NO: 19250 - RNA, 22 nt, synthetic construct
  source 1..22: mol_type = other RNA
taaaagtgcaaagaatattcag

SEQ ID NO: 19251 - RNA, 22 nt, synthetic construct
  source 1..22: mol_type = other RNA
aaaagtgcaaagaatattcagt

SEQ ID NO: 19252 - RNA, 22 nt, synthetic construct
  source 1..22: mol_type = other RNA
aaagtgcaaagaatattcagtg

SEQ ID NO: 19253 - RNA, 22 nt, synthetic construct
  source 1..22: mol_type = other RNA
agtgaaggctgggcgcagcggc

SEQ ID NO: 19254 - RNA, 22 nt, synthetic construct
  source 1..22: mol_type = other RNA
gggaggccaagggggacggatc

SEQ ID NO: 19255 - RNA, 22 nt, synthetic construct
  source 1..22: mol_type = other RNA
ggaggccaagggggacggatca

SEQ ID NO: 19256 - RNA, 22 nt, synthetic construct
  source 1..22: mol_type = other RNA
gatacctgcctggccaacatgg

SEQ ID NO: 19257 - RNA, 22 nt, synthetic construct
  source 1..22: mol_type = other RNA
atacctgcctggccaacatggt

SEQ ID NO: 19258 - RNA, 22 nt, synthetic construct
  source 1..22: mol_type = other RNA
gccgggtgtggtggtgcacgcc

SEQ ID NO: 19259 - RNA, 22 nt, synthetic construct
  source 1..22: mol_type = other RNA
cagtgagctaagatcacgccac

SEQ ID NO: 19260 - RNA, 22 nt, synthetic construct
  source 1..22: mol_type = other RNA
agtgaaaaaaaaatctccctcc

SEQ ID NO: 19261 - RNA, 22 nt, synthetic construct
  source 1..22: mol_type = other RNA
tgtagtccctcagttttgctcc

SEQ ID NO: 19262 - RNA, 22 nt, synthetic construct
  source 1..22: mol_type = other RNA
tgctcctatcttagtcaaccta

SEQ ID NO: 19263 - RNA, 22 nt, synthetic construct
  source 1..22: mol_type = other RNA
gctcctatcttagtcaacctat

SEQ ID NO: 19264 - RNA, 22 nt, synthetic construct
  source 1..22: mol_type = other RNA
ctcctatcttagtcaacctatg

SEQ ID NO: 19265 - RNA, 22 nt, synthetic construct
  source 1..22: mol_type = other RNA
tgccttgtcagaaataaagcga

SEQ ID NO: 19266 - RNA, 22 nt, synthetic construct
  source 1..22: mol_type = other RNA
gccttgtcagaaataaagcgag

SEQ ID NO: 19267 - RNA, 22 nt, synthetic construct
  source 1..22: mol_type = other RNA
ccttgtcagaaataaagcgagc

SEQ ID NO: 19268 - RNA, 22 nt, synthetic construct
  source 1..22: mol_type = other RNA
gctttaattttccatgcaaatg

SEQ ID NO: 19269 - RNA, 22 nt, synthetic construct
  source 1..22: mol_type = other RNA
ctttaattttccatgcaaatga

SEQ ID NO: 19270 - RNA, 22 nt, synthetic construct
  source 1..22: mol_type = other RNA
attttccatgcaaatgaccaca

SEQ ID NO: 19271 - RNA, 22 nt, synthetic construct
  source 1..22: mol_type = other RNA
tccatgcaaatgaccacatttt

SEQ ID NO: 19272 - RNA, 22 nt, synthetic construct
  source 1..22: mol_type = other RNA
ccatgcaaatgaccacatttta

SEQ ID NO: 19273 - RNA, 22 nt, synthetic construct
  source 1..22: mol_type = other RNA
catgcaaatgaccacattttat

SEQ ID NO: 19274 - RNA, 22 nt, synthetic construct
  source 1..22: mol_type = other RNA
tatttacactattctgcatttt

SEQ ID NO: 19275 - RNA, 22 nt, synthetic construct
  source 1..22: mol_type = other RNA
atttacactattctgcattttg

SEQ ID NO: 19276 - RNA, 22 nt, synthetic construct
  source 1..22: mol_type = other RNA
tttacactattctgcattttgc

SEQ ID NO: 19277 - RNA, 22 nt, synthetic construct
  source 1..22: mol_type = other RNA
acactattctgcattttgcttt

SEQ ID NO: 19278 - RNA, 22 nt, synthetic construct
  source 1..22: mol_type = other RNA
cactattctgcattttgctttc

SEQ ID NO: 19279 - RNA, 22 nt, synthetic construct
  source 1..22: mol_type = other RNA
tgcattttgctttcttcattta

SEQ ID NO: 19280 - RNA, 22 nt, synthetic construct
  source 1..22: mol_type = other RNA
tgctttcttcatttacttcatt

SEQ ID NO: 19281 - RNA, 22 nt, synthetic construct
  source 1..22: mol_type = other RNA
gctttcttcatttacttcatta

SEQ ID NO: 19282 - RNA, 22 nt, synthetic construct
  source 1..22: mol_type = other RNA
ctttcttcatttacttcattac

SEQ ID NO: 19283 - RNA, 22 nt, synthetic construct
  source 1..22: mol_type = other RNA
ttcatttacttcattactccct

SEQ ID NO: 19284 - RNA, 22 nt, synthetic construct
  source 1..22: mol_type = other RNA
acttcattactccctgtctggg

SEQ ID NO: 19285 - RNA, 22 nt, synthetic construct
  source 1..22: mol_type = other RNA
cttcattactccctgtctggga

SEQ ID NO: 19286 - RNA, 22 nt, synthetic construct
  source 1..22: mol_type = other RNA
ctccctgtctgggaggtcacgt

SEQ ID NO: 19287 - RNA, 22 nt, synthetic construct
  source 1..22: mol_type = other RNA
catattattgagggagaggaca

SEQ ID NO: 19288 - RNA, 22 nt, synthetic construct
  source 1..22: mol_type = other RNA
ttgagggagaggacacggtcct

SEQ ID NO: 19289 - RNA, 22 nt, synthetic construct
  source 1..22: mol_type = other RNA
agggagaggacacggtcctatc

SEQ ID NO: 19290 - RNA, 22 nt, synthetic construct
  source 1..22: mol_type = other RNA
tctttcttttcttgtttttctt

SEQ ID NO: 19291 - RNA, 22 nt, synthetic construct
  source 1..22: mol_type = other RNA
ctttcttttcttgtttttcttc

SEQ ID NO: 19292 - RNA, 22 nt, synthetic construct
  source 1..22: mol_type = other RNA
tttcttttcttgtttttcttct

SEQ ID NO: 19293 - RNA, 22 nt, synthetic construct
  source 1..22: mol_type = other RNA
ttttcttgtttttcttctttat

SEQ ID NO: 19294 - RNA, 22 nt, synthetic construct
  source 1..22: mol_type = other RNA
cttgtttttcttctttatgttt

SEQ ID NO: 19295 - RNA, 22 nt, synthetic construct
  source 1..22: mol_type = other RNA
ttgtttttcttctttatgtttt

SEQ ID NO: 19296 - RNA, 22 nt, synthetic construct
  source 1..22: mol_type = other RNA
ttcttctttatgttttcatttg

SEQ ID NO: 19297 - RNA, 22 nt, synthetic construct
  source 1..22: mol_type = other RNA
tcttctttatgttttcatttga

SEQ ID NO: 19298 - RNA, 22 nt, synthetic construct
  source 1..22: mol_type = other RNA
cttctttatgttttcatttgat

SEQ ID NO: 19299 - RNA, 22 nt, synthetic construct
  source 1..22: mol_type = other RNA
ttctttatgttttcatttgata

SEQ ID NO: 19300 - RNA, 22 nt, synthetic construct
  source 1..22: mol_type = other RNA
tgttttcatttgataaatattt

SEQ ID NO: 19301 - RNA, 22 nt, synthetic construct
  source 1..22: mol_type = other RNA
tcatttgataaatatttccccc

SEQ ID NO: 19302 - RNA, 22 nt, synthetic construct
  source 1..22: mol_type = other RNA
catttgataaatatttcccccc

SEQ ID NO: 19303 - RNA, 22 nt, synthetic construct
  source 1..22: mol_type = other RNA
atttgataaatatttcccccca

SEQ ID NO: 19304 - RNA, 22 nt, synthetic construct
  source 1..22: mol_type = other RNA
gataaatatttccccccaagat

SEQ ID NO: 19305 - RNA, 22 nt, synthetic construct
  source 1..22: mol_type = other RNA
ataaatatttccccccaagatt

SEQ ID NO: 19306 - RNA, 22 nt, synthetic construct
  source 1..22: mol_type = other RNA
ccccccaagattttattgtgaa

SEQ ID NO: 19307 - RNA, 22 nt, synthetic construct
  source 1..22: mol_type = other RNA
cccccaagattttattgtgaaa

SEQ ID NO: 19308 - RNA, 22 nt, synthetic construct
  source 1..22: mol_type = other RNA
tattgtgaaagttttcggccag

SEQ ID NO: 19309 - RNA, 22 nt, synthetic construct
  source 1..22: mol_type = other RNA
attgtgaaagttttcggccagg

SEQ ID NO: 19310 - RNA, 22 nt, synthetic construct
  source 1..22: mol_type = other RNA
ttgtgaaagttttcggccaggc

SEQ ID NO: 19311 - RNA, 22 nt, synthetic construct
  source 1..22: mol_type = other RNA
tgaaagttttcggccaggcgtg

SEQ ID NO: 19312 - RNA, 22 nt, synthetic construct
  source 1..22: mol_type = other RNA
tcggccaggcgtggtggctcac

SEQ ID NO: 19313 - RNA, 22 nt, synthetic construct
  source 1..22: mol_type = other RNA
cggccaggcgtggtggctcaca

SEQ ID NO: 19314 - RNA, 22 nt, synthetic construct
  source 1..22: mol_type = other RNA
ggccaggcgtggtggctcacat

SEQ ID NO: 19315 - RNA, 22 nt, synthetic construct
  source 1..22: mol_type = other RNA
ggaggccaaggctggcagatca

SEQ ID NO: 19316 - RNA, 22 nt, synthetic construct
  source 1..22: mol_type = other RNA
gagaccagcctggccaacatgg

SEQ ID NO: 19317 - RNA, 22 nt, synthetic construct
  source 1..22: mol_type = other RNA
agaccagcctggccaacatggt

SEQ ID NO: 19318 - RNA, 22 nt, synthetic construct
  source 1..22: mol_type = other RNA
gccaggcgtggtggcgaacacc

SEQ ID NO: 19319 - RNA, 22 nt, synthetic construct
  source 1..22: mol_type = other RNA
cagtgagccaagattgcgccag

SEQ ID NO: 19320 - RNA, 22 nt, synthetic construct
  source 1..22: mol_type = other RNA
cgccagtgcactccagcctggg

SEQ ID NO: 19321 - RNA, 22 nt, synthetic construct
  source 1..22: mol_type = other RNA
caaaaaaaaaaaaaaatgtttt

SEQ ID NO: 19322 - RNA, 22 nt, synthetic construct
  source 1..22: mol_type = other RNA
aaaaaaaaaaaaaaatgttttc

SEQ ID NO: 19323 - RNA, 22 nt, synthetic construct
  source 1..22: mol_type = other RNA
tcaagatacaataaaagtgaaa

SEQ ID NO: 19324 - RNA, 22 nt, synthetic construct
  source 1..22: mol_type = other RNA
caagatacaataaaagtgaaag

SEQ ID NO: 19325 - RNA, 22 nt, synthetic construct
  source 1..22: mol_type = other RNA
aagatacaataaaagtgaaaga

SEQ ID NO: 19326 - RNA, 22 nt, synthetic construct
  source 1..22: mol_type = other RNA
tgattctacaattaatgttggg

SEQ ID NO: 19327 - RNA, 22 nt, synthetic construct
  source 1..22: mol_type = other RNA
gattctacaattaatgttgggt

SEQ ID NO: 19328 - RNA, 22 nt, synthetic construct
  source 1..22: mol_type = other RNA
attctacaattaatgttgggtt

SEQ ID NO: 19329 - RNA, 22 nt, synthetic construct
  source 1..22: mol_type = other RNA
tacaattaatgttgggttttat

SEQ ID NO: 19330 - RNA, 22 nt, synthetic construct
  source 1..22: mol_type = other RNA
atgttgggttttattcatctta

SEQ ID NO: 19331 - RNA, 22 nt, synthetic construct
  source 1..22: mol_type = other RNA
ggttttattcatcttatcacat

SEQ ID NO: 19332 - RNA, 22 nt, synthetic construct
  source 1..22: mol_type = other RNA
tattcatcttatcacatctcta

SEQ ID NO: 19333 - RNA, 22 nt, synthetic construct
  source 1..22: mol_type = other RNA
attcatcttatcacatctctat

SEQ ID NO: 19334 - RNA, 22 nt, synthetic construct
  source 1..22: mol_type = other RNA
ttcatcttatcacatctctatt

SEQ ID NO: 19335 - RNA, 22 nt, synthetic construct
  source 1..22: mol_type = other RNA
atcttatcacatctctattcat

SEQ ID NO: 19336 - RNA, 22 nt, synthetic construct
  source 1..22: mol_type = other RNA
atctgtccatccctctatccat

SEQ ID NO: 19337 - RNA, 22 nt, synthetic construct
  source 1..22: mol_type = other RNA
attatatttttggtacatttca

SEQ ID NO: 19338 - RNA, 22 nt, synthetic construct
  source 1..22: mol_type = other RNA
tatttttggtacatttcaatgt

SEQ ID NO: 19339 - RNA, 22 nt, synthetic construct
  source 1..22: mol_type = other RNA
ttggtacatttcaatgtacatt

SEQ ID NO: 19340 - RNA, 22 nt, synthetic construct
  source 1..22: mol_type = other RNA
tggtacatttcaatgtacattt

SEQ ID NO: 19341 - RNA, 22 nt, synthetic construct
  source 1..22: mol_type = other RNA
ggtacatttcaatgtacatttc

SEQ ID NO: 19342 - RNA, 22 nt, synthetic construct
  source 1..22: mol_type = other RNA
gtacatttcaatgtacatttca

SEQ ID NO: 19343 - RNA, 22 nt, synthetic construct
  source 1..22: mol_type = other RNA
caatgtacatttcaaatgtaaa

SEQ ID NO: 19344 - RNA, 22 nt, synthetic construct
  source 1..22: mol_type = other RNA
aatgtacatttcaaatgtaaat

SEQ ID NO: 19345 - RNA, 22 nt, synthetic construct
  source 1..22: mol_type = other RNA
caaatgtaaattgcagatttac

SEQ ID NO: 19346 - RNA, 22 nt, synthetic construct
  source 1..22: mol_type = other RNA
aaatgtaaattgcagatttaca

SEQ ID NO: 19347 - RNA, 22 nt, synthetic construct
  source 1..22: mol_type = other RNA
cagatttacactcccctcgtgt

SEQ ID NO: 19348 - RNA, 22 nt, synthetic construct
  source 1..22: mol_type = other RNA
acactcccctcgtgtacttcag

SEQ ID NO: 19349 - RNA, 22 nt, synthetic construct
  source 1..22: mol_type = other RNA
cactcccctcgtgtacttcagc

SEQ ID NO: 19350 - RNA, 22 nt, synthetic construct
  source 1..22: mol_type = other RNA
ttttaaggccatgcagtgtttc

SEQ ID NO: 19351 - RNA, 22 nt, synthetic construct
  source 1..22: mol_type = other RNA
aaggccatgcagtgtttcgttg

SEQ ID NO: 19352 - RNA, 22 nt, synthetic construct
  source 1..22: mol_type = other RNA
aggccatgcagtgtttcgttgg

SEQ ID NO: 19353 - RNA, 22 nt, synthetic construct
  source 1..22: mol_type = other RNA
cgttgggtagatgaaccataat

SEQ ID NO: 19354 - RNA, 22 nt, synthetic construct
  source 1..22: mol_type = other RNA
gttgggtagatgaaccataatt

SEQ ID NO: 19355 - RNA, 22 nt, synthetic construct
  source 1..22: mol_type = other RNA
ggtagatgaaccataatttgtt

SEQ ID NO: 19356 - RNA, 22 nt, synthetic construct
  source 1..22: mol_type = other RNA
gtttaagcagtcccttgctaag

SEQ ID NO: 19357 - RNA, 22 nt, synthetic construct
  source 1..22: mol_type = other RNA
tttaagcagtcccttgctaagg

SEQ ID NO: 19358 - RNA, 22 nt, synthetic construct
  source 1..22: mol_type = other RNA
aagcagtcccttgctaagggac

SEQ ID NO: 19359 - RNA, 22 nt, synthetic construct
  source 1..22: mol_type = other RNA
agcagtcccttgctaagggaca

SEQ ID NO: 19360 - RNA, 22 nt, synthetic construct
  source 1..22: mol_type = other RNA
ttaatctgttgctgtgagtgct

SEQ ID NO: 19361 - RNA, 22 nt, synthetic construct
  source 1..22: mol_type = other RNA
taatctgttgctgtgagtgctt

SEQ ID NO: 19362 - RNA, 22 nt, synthetic construct
  source 1..22: mol_type = other RNA
aatctgttgctgtgagtgcttg

SEQ ID NO: 19363 - RNA, 22 nt, synthetic construct
  source 1..22: mol_type = other RNA
atctgttgctgtgagtgcttga

SEQ ID NO: 19364 - RNA, 22 nt, synthetic construct
  source 1..22: mol_type = other RNA
ctgtgagtgcttgatactcact

SEQ ID NO: 19365 - RNA, 22 nt, synthetic construct
  source 1..22: mol_type = other RNA
ctggcatactcctgcaatgtag

SEQ ID NO: 19366 - RNA, 22 nt, synthetic construct
  source 1..22: mol_type = other RNA
tggcatactcctgcaatgtagg

SEQ ID NO: 19367 - RNA, 22 nt, synthetic construct
  source 1..22: mol_type = other RNA
catagatgtgagatcaaaggtt

SEQ ID NO: 19368 - RNA, 22 nt, synthetic construct
  source 1..22: mol_type = other RNA
atagatgtgagatcaaaggttc

SEQ ID NO: 19369 - RNA, 22 nt, synthetic construct
  source 1..22: mol_type = other RNA
agagaagctgcattgcaaaggc

SEQ ID NO: 19370 - RNA, 22 nt, synthetic construct
  source 1..22: mol_type = other RNA
caaaggcacacagctaggaagc

SEQ ID NO: 19371 - RNA, 22 nt, synthetic construct
  source 1..22: mol_type = other RNA
aaaagcaggttcctttgttttg

SEQ ID NO: 19372 - RNA, 22 nt, synthetic construct
  source 1..22: mol_type = other RNA
ctttgttttgttttgttttgtt

SEQ ID NO: 19373 - RNA, 22 nt, synthetic construct
  source 1..22: mol_type = other RNA
tgttttgttttgttttttggct

SEQ ID NO: 19374 - RNA, 22 nt, synthetic construct
  source 1..22: mol_type = other RNA
gttttgttttgttttttggctc

SEQ ID NO: 19375 - RNA, 22 nt, synthetic construct
  source 1..22: mol_type = other RNA
ttttgttttgttttttggctca

SEQ ID NO: 19376 - RNA, 22 nt, synthetic construct
  source 1..22: mol_type = other RNA
tgttttgttttttggctcaaac

SEQ ID NO: 19377 - RNA, 22 nt, synthetic construct
  source 1..22: mol_type = other RNA
gttttgttttttggctcaaacc

SEQ ID NO: 19378 - RNA, 22 nt, synthetic construct
  source 1..22: mol_type = other RNA
ttttgttttttggctcaaaccc

SEQ ID NO: 19379 - RNA, 22 nt, synthetic construct
  source 1..22: mol_type = other RNA
tgttttttggctcaaacccatg

SEQ ID NO: 19380 - RNA, 22 nt, synthetic construct
  source 1..22: mol_type = other RNA
gttttttggctcaaacccatgt

SEQ ID NO: 19381 - RNA, 22 nt, synthetic construct
  source 1..22: mol_type = other RNA
ttttttggctcaaacccatgtt

SEQ ID NO: 19382 - RNA, 22 nt, synthetic construct
  source 1..22: mol_type = other RNA
tttggctcaaacccatgttgtg

SEQ ID NO: 19383 - RNA, 22 nt, synthetic construct
  source 1..22: mol_type = other RNA
ttggctcaaacccatgttgtgt

SEQ ID NO: 19384 - RNA, 22 nt, synthetic construct
  source 1..22: mol_type = other RNA
tggctcaaacccatgttgtgtc

SEQ ID NO: 19385 - RNA, 22 nt, synthetic construct
  source 1..22: mol_type = other RNA
ggctcaaacccatgttgtgtcc

SEQ ID NO: 19386 - RNA, 22 nt, synthetic construct
  source 1..22: mol_type = other RNA
gctcaaacccatgttgtgtccc

SEQ ID NO: 19387 - RNA, 22 nt, synthetic construct
  source 1..22: mol_type = other RNA
tgtccccatttgtgactcggcc

SEQ ID NO: 19388 - RNA, 22 nt, synthetic construct
  source 1..22: mol_type = other RNA
gtgactcggcctcttctgctgc

SEQ ID NO: 19389 - RNA, 22 nt, synthetic construct
  source 1..22: mol_type = other RNA
tgactcggcctcttctgctgct

SEQ ID NO: 19390 - RNA, 22 nt, synthetic construct
  source 1..22: mol_type = other RNA
gagatggggtttgggttcaagc

SEQ ID NO: 19391 - RNA, 22 nt, synthetic construct
  source 1..22: mol_type = other RNA
agatggggtttgggttcaagcc

SEQ ID NO: 19392 - RNA, 22 nt, synthetic construct
  source 1..22: mol_type = other RNA
gggttcaagccaaggagctggg

SEQ ID NO: 19393 - RNA, 22 nt, synthetic construct
  source 1..22: mol_type = other RNA
ggttcaagccaaggagctgggg

SEQ ID NO: 19394 - RNA, 22 nt, synthetic construct
  source 1..22: mol_type = other RNA
aagccaaggagctggggttgga

SEQ ID NO: 19395 - RNA, 22 nt, synthetic construct
  source 1..22: mol_type = other RNA
gaatgttagagcgaggggagga

SEQ ID NO: 19396 - RNA, 22 nt, synthetic construct
  source 1..22: mol_type = other RNA
gagcgaggggaggaaaatggac

SEQ ID NO: 19397 - RNA, 22 nt, synthetic construct
  source 1..22: mol_type = other RNA
aggccgtatagcctgctagagt

SEQ ID NO: 19398 - RNA, 22 nt, synthetic construct
  source 1..22: mol_type = other RNA
tctctgcagccttcccagagga

SEQ ID NO: 19399 - RNA, 22 nt, synthetic construct
  source 1..22: mol_type = other RNA
ctctgcagccttcccagaggag

SEQ ID NO: 19400 - RNA, 22 nt, synthetic construct
  source 1..22: mol_type = other RNA
tctgcagccttcccagaggagc

SEQ ID NO: 19401 - RNA, 22 nt, synthetic construct
  source 1..22: mol_type = other RNA
ggaagggtggatgccttgggga

SEQ ID NO: 19402 - RNA, 22 nt, synthetic construct
  source 1..22: mol_type = other RNA
aactcctggcccaagtctgatg

SEQ ID NO: 19403 - RNA, 22 nt, synthetic construct
  source 1..22: mol_type = other RNA
ggtagaggctgagagcttgggg

SEQ ID NO: 19404 - RNA, 22 nt, synthetic construct
  source 1..22: mol_type = other RNA
gtggaaggtggtaggggcttgg

SEQ ID NO: 19405 - RNA, 22 nt, synthetic construct
  source 1..22: mol_type = other RNA
tggaaggtggtaggggcttgga

SEQ ID NO: 19406 - RNA, 22 nt, synthetic construct
  source 1..22: mol_type = other RNA
ttcataggttctattctgcccc

SEQ ID NO: 19407 - RNA, 22 nt, synthetic construct
  source 1..22: mol_type = other RNA
ataggttctattctgccccagc

SEQ ID NO: 19408 - RNA, 22 nt, synthetic construct
  source 1..22: mol_type = other RNA
tattctgccccagctctccgtg

SEQ ID NO: 19409 - RNA, 22 nt, synthetic construct
  source 1..22: mol_type = other RNA
tgccccagctctccgtgtggag

SEQ ID NO: 19410 - RNA, 22 nt, synthetic construct
  source 1..22: mol_type = other RNA
ctgatcaacacagctgcagcca

SEQ ID NO: 19411 - RNA, 22 nt, synthetic construct
  source 1..22: mol_type = other RNA
cctctgtcaggagagacatcca

SEQ ID NO: 19412 - RNA, 22 nt, synthetic construct
  source 1..22: mol_type = other RNA
ctctgtcaggagagacatccat

SEQ ID NO: 19413 - RNA, 22 nt, synthetic construct
  source 1..22: mol_type = other RNA
aaccaggagccagcctccggcc

SEQ ID NO: 19414 - RNA, 22 nt, synthetic construct
  source 1..22: mol_type = other RNA
ccagtatgttagggggcttgga

SEQ ID NO: 19415 - RNA, 22 nt, synthetic construct
  source 1..22: mol_type = other RNA
gggggcttggagagagtgggct

SEQ ID NO: 19416 - RNA, 22 nt, synthetic construct
  source 1..22: mol_type = other RNA
tccctcttgggaggtggataag

SEQ ID NO: 19417 - RNA, 22 nt, synthetic construct
  source 1..22: mol_type = other RNA
acactaaggcagggactgtcag

SEQ ID NO: 19418 - RNA, 22 nt, synthetic construct
  source 1..22: mol_type = other RNA
tatccttggggcccccgtcagc

SEQ ID NO: 19419 - RNA, 22 nt, synthetic construct
  source 1..22: mol_type = other RNA
atccttggggcccccgtcagct

SEQ ID NO: 19420 - RNA, 22 nt, synthetic construct
  source 1..22: mol_type = other RNA
tccttggggcccccgtcagctc

SEQ ID NO: 19421 - RNA, 22 nt, synthetic construct
  source 1..22: mol_type = other RNA
gagcattcacctgccagcctta

SEQ ID NO: 19422 - RNA, 22 nt, synthetic construct
  source 1..22: mol_type = other RNA
acctgccagccttattcgttca

SEQ ID NO: 19423 - RNA, 22 nt, synthetic construct
  source 1..22: mol_type = other RNA
gttcatcagctcttcatggagc

SEQ ID NO: 19424 - RNA, 22 nt, synthetic construct
  source 1..22: mol_type = other RNA
atcagctcttcatggagcccct

SEQ ID NO: 19425 - RNA, 22 nt, synthetic construct
  source 1..22: mol_type = other RNA
catcagggcaggacagaaacag

SEQ ID NO: 19426 - RNA, 22 nt, synthetic construct
  source 1..22: mol_type = other RNA
gggccctttaggggggtcagac

SEQ ID NO: 19427 - RNA, 22 nt, synthetic construct
  source 1..22: mol_type = other RNA
ggggggtcagacattaatcaaa

SEQ ID NO: 19428 - RNA, 22 nt, synthetic construct
  source 1..22: mol_type = other RNA
atcaaataagcaaaagcagaat

SEQ ID NO: 19429 - RNA, 22 nt, synthetic construct
  source 1..22: mol_type = other RNA
tctcttgcagtgcctttctcca

SEQ ID NO: 19430 - RNA, 22 nt, synthetic construct
  source 1..22: mol_type = other RNA
tccagttcctcgttgagctgcc

SEQ ID NO: 19431 - RNA, 22 nt, synthetic construct
  source 1..22: mol_type = other RNA
ctcgttgagctgcctgaatctc

SEQ ID NO: 19432 - RNA, 22 nt, synthetic construct
  source 1..22: mol_type = other RNA
agctgcctgaatctccctgagg

SEQ ID NO: 19433 - RNA, 22 nt, synthetic construct
  source 1..22: mol_type = other RNA
gtccccaccatctccactctgc

SEQ ID NO: 19434 - RNA, 22 nt, synthetic construct
  source 1..22: mol_type = other RNA
tccccaccatctccactctgcc

SEQ ID NO: 19435 - RNA, 22 nt, synthetic construct
  source 1..22: mol_type = other RNA
atctaccatggtgagtgcgggg

SEQ ID NO: 19436 - RNA, 22 nt, synthetic construct
  source 1..22: mol_type = other RNA
tctgtccctatttcccaaaaat

SEQ ID NO: 19437 - RNA, 22 nt, synthetic construct
  source 1..22: mol_type = other RNA
cccaaaaatcaaagcagaagag

SEQ ID NO: 19438 - RNA, 22 nt, synthetic construct
  source 1..22: mol_type = other RNA
ccaaaaatcaaagcagaagagc

SEQ ID NO: 19439 - RNA, 22 nt, synthetic construct
  source 1..22: mol_type = other RNA
ctgaggtggtctgggtgcatga

SEQ ID NO: 19440 - RNA, 22 nt, synthetic construct
  source 1..22: mol_type = other RNA
tgtggccttccatatgttgctt

SEQ ID NO: 19441 - RNA, 22 nt, synthetic construct
  source 1..22: mol_type = other RNA
ctttccccttctgacccttagt

SEQ ID NO: 19442 - RNA, 22 nt, synthetic construct
  source 1..22: mol_type = other RNA
cccttctgacccttagtttttc

SEQ ID NO: 19443 - RNA, 22 nt, synthetic construct
  source 1..22: mol_type = other RNA
ttccttattttttttaaatgtt

SEQ ID NO: 19444 - RNA, 22 nt, synthetic construct
  source 1..22: mol_type = other RNA
tccttattttttttaaatgttt

SEQ ID NO: 19445 - RNA, 22 nt, synthetic construct
  source 1..22: mol_type = other RNA
ccttattttttttaaatgtttt

SEQ ID NO: 19446 - RNA, 22 nt, synthetic construct
  source 1..22: mol_type = other RNA
cttattttttttaaatgttttt

SEQ ID NO: 19447 - RNA, 22 nt, synthetic construct
  source 1..22: mol_type = other RNA
tttttaaatgtttttgttttta

SEQ ID NO: 19448 - RNA, 22 nt, synthetic construct
  source 1..22: mol_type = other RNA
ttttaaatgtttttgtttttaa

SEQ ID NO: 19449 - RNA, 22 nt, synthetic construct
  source 1..22: mol_type = other RNA
tttaaatgtttttgtttttaaa

SEQ ID NO: 19450 - RNA, 22 nt, synthetic construct
  source 1..22: mol_type = other RNA
ttaaatgtttttgtttttaaat

SEQ ID NO: 19451 - RNA, 22 nt, synthetic construct
  source 1..22: mol_type = other RNA
taaatgtttttgtttttaaatt

SEQ ID NO: 19452 - RNA, 22 nt, synthetic construct
  source 1..22: mol_type = other RNA
aaatgtttttgtttttaaattg

SEQ ID NO: 19453 - RNA, 22 nt, synthetic construct
  source 1..22: mol_type = other RNA
aatgtttttgtttttaaattgc

SEQ ID NO: 19454 - RNA, 22 nt, synthetic construct
  source 1..22: mol_type = other RNA
ttgtttttaaattgcaacatca

SEQ ID NO: 19455 - RNA, 22 nt, synthetic construct
  source 1..22: mol_type = other RNA
tgtttttaaattgcaacatcaa

SEQ ID NO: 19456 - RNA, 22 nt, synthetic construct
  source 1..22: mol_type = other RNA
gtttttaaattgcaacatcaat

SEQ ID NO: 19457 - RNA, 22 nt, synthetic construct
  source 1..22: mol_type = other RNA
tttttaaattgcaacatcaata

SEQ ID NO: 19458 - RNA, 22 nt, synthetic construct
  source 1..22: mol_type = other RNA
ttaaattgcaacatcaatacat

SEQ ID NO: 19459 - RNA, 22 nt, synthetic construct
  source 1..22: mol_type = other RNA
taaattgcaacatcaatacatg

SEQ ID NO: 19460 - RNA, 22 nt, synthetic construct
  source 1..22: mol_type = other RNA
aaattgcaacatcaatacatgc

SEQ ID NO: 19461 - RNA, 22 nt, synthetic construct
  source 1..22: mol_type = other RNA
aattgcaacatcaatacatgct

SEQ ID NO: 19462 - RNA, 22 nt, synthetic construct
  source 1..22: mol_type = other RNA
caacatcaatacatgctcacta

SEQ ID NO: 19463 - RNA, 22 nt, synthetic construct
  source 1..22: mol_type = other RNA
acaagaattcactgtctctctc

SEQ ID NO: 19464 - RNA, 22 nt, synthetic construct
  source 1..22: mol_type = other RNA
caagaattcactgtctctctca

SEQ ID NO: 19465 - RNA, 22 nt, synthetic construct
  source 1..22: mol_type = other RNA
actgtctctctcactcttttag

SEQ ID NO: 19466 - RNA, 22 nt, synthetic construct
  source 1..22: mol_type = other RNA
agtatactgatgtgaatagttt

SEQ ID NO: 19467 - RNA, 22 nt, synthetic construct
  source 1..22: mol_type = other RNA
gtatactgatgtgaatagtttg

SEQ ID NO: 19468 - RNA, 22 nt, synthetic construct
  source 1..22: mol_type = other RNA
ggtgtgcatccttgcatagctt

SEQ ID NO: 19469 - RNA, 22 nt, synthetic construct
  source 1..22: mol_type = other RNA
gtgtgcatccttgcatagcttt

SEQ ID NO: 19470 - RNA, 22 nt, synthetic construct
  source 1..22: mol_type = other RNA
tctgatttgtcttgtttcctaa

SEQ ID NO: 19471 - RNA, 22 nt, synthetic construct
  source 1..22: mol_type = other RNA
gtcttgtttcctaatcagtaaa

SEQ ID NO: 19472 - RNA, 22 nt, synthetic construct
  source 1..22: mol_type = other RNA
tcttgtttcctaatcagtaaaa

SEQ ID NO: 19473 - RNA, 22 nt, synthetic construct
  source 1..22: mol_type = other RNA
cctaatcagtaaaatggtccct

SEQ ID NO: 19474 - RNA, 22 nt, synthetic construct
  source 1..22: mol_type = other RNA
ctaatcagtaaaatggtcccta

SEQ ID NO: 19475 - RNA, 22 nt, synthetic construct
  source 1..22: mol_type = other RNA
tgacttgtctcagggaaggtgt

SEQ ID NO: 19476 - RNA, 22 nt, synthetic construct
  source 1..22: mol_type = other RNA
gggctgtcagggatgagaccag

SEQ ID NO: 19477 - RNA, 22 nt, synthetic construct
  source 1..22: mol_type = other RNA
ggctgtcagggatgagaccagg

SEQ ID NO: 19478 - RNA, 22 nt, synthetic construct
  source 1..22: mol_type = other RNA
ctggttgcaagacagtttcagt

SEQ ID NO: 19479 - RNA, 22 nt, synthetic construct
  source 1..22: mol_type = other RNA
caagacagtttcagtataacgc

SEQ ID NO: 19480 - RNA, 22 nt, synthetic construct
  source 1..22: mol_type = other RNA
cagtataacgcactggtatctc

SEQ ID NO: 19481 - RNA, 22 nt, synthetic construct
  source 1..22: mol_type = other RNA
agtataacgcactggtatctca

SEQ ID NO: 19482 - RNA, 22 nt, synthetic construct
  source 1..22: mol_type = other RNA
ctgatatctaggaaaatgagca

SEQ ID NO: 19483 - RNA, 22 nt, synthetic construct
  source 1..22: mol_type = other RNA
cttatgagctaattgcacccat

SEQ ID NO: 19484 - RNA, 22 nt, synthetic construct
  source 1..22: mol_type = other RNA
cacccatttcacagattggaaa

SEQ ID NO: 19485 - RNA, 22 nt, synthetic construct
  source 1..22: mol_type = other RNA
cacagattggaaaagcaaggtt

SEQ ID NO: 19486 - RNA, 22 nt, synthetic construct
  source 1..22: mol_type = other RNA
acagattggaaaagcaaggttc

SEQ ID NO: 19487 - RNA, 22 nt, synthetic construct
  source 1..22: mol_type = other RNA
gaaaagcaaggttccaggagct

SEQ ID NO: 19488 - RNA, 22 nt, synthetic construct
  source 1..22: mol_type = other RNA
caggagctagatgtaactccag

SEQ ID NO: 19489 - RNA, 22 nt, synthetic construct
  source 1..22: mol_type = other RNA
ttcagctctgtcctgaaatatc

SEQ ID NO: 19490 - RNA, 22 nt, synthetic construct
  source 1..22: mol_type = other RNA
gaagttctactctcttctctcc

SEQ ID NO: 19491 - RNA, 22 nt, synthetic construct
  source 1..22: mol_type = other RNA
tactctcttctctccagacttc

SEQ ID NO: 19492 - RNA, 22 nt, synthetic construct
  source 1..22: mol_type = other RNA
ggagtaggggtgacccaagtgc

SEQ ID NO: 19493 - RNA, 22 nt, synthetic construct
  source 1..22: mol_type = other RNA
gagtaggggtgacccaagtgca

SEQ ID NO: 19494 - RNA, 22 nt, synthetic construct
  source 1..22: mol_type = other RNA
ctggaatcaatacctggttatt

SEQ ID NO: 19495 - RNA, 22 nt, synthetic construct
  source 1..22: mol_type = other RNA
tggaatcaatacctggttattc

SEQ ID NO: 19496 - RNA, 22 nt, synthetic construct
  source 1..22: mol_type = other RNA
ttctcacaccactctccacccc

SEQ ID NO: 19497 - RNA, 22 nt, synthetic construct
  source 1..22: mol_type = other RNA
tcacaccactctccacccccaa

SEQ ID NO: 19498 - RNA, 22 nt, synthetic construct
  source 1..22: mol_type = other RNA
actgtccacggcctcccaacat

SEQ ID NO: 19499 - RNA, 22 nt, synthetic construct
  source 1..22: mol_type = other RNA
tctcaaataagatccacaagca

SEQ ID NO: 19500 - RNA, 22 nt, synthetic construct
  source 1..22: mol_type = other RNA
aggggtcagtcgggacagggag

SEQ ID NO: 19501 - RNA, 22 nt, synthetic construct
  source 1..22: mol_type = other RNA
ggggtcagtcgggacagggagg

SEQ ID NO: 19502 - RNA, 22 nt, synthetic construct
  source 1..22: mol_type = other RNA
tgggggaatggacagctagaga

SEQ ID NO: 19503 - RNA, 22 nt, synthetic construct
  source 1..22: mol_type = other RNA
cccagcagaaaagccagacaat

SEQ ID NO: 19504 - RNA, 22 nt, synthetic construct
  source 1..22: mol_type = other RNA
gaagttgaaaaccctgattttt

SEQ ID NO: 19505 - RNA, 22 nt, synthetic construct
  source 1..22: mol_type = other RNA
aagttgaaaaccctgattttta

SEQ ID NO: 19506 - RNA, 22 nt, synthetic construct
  source 1..22: mol_type = other RNA
aaaaccctgatttttacataga

SEQ ID NO: 19507 - RNA, 22 nt, synthetic construct
  source 1..22: mol_type = other RNA
ttacatagatattgtgattttt

SEQ ID NO: 19508 - RNA, 22 nt, synthetic construct
  source 1..22: mol_type = other RNA
tacatagatattgtgatttttt

SEQ ID NO: 19509 - RNA, 22 nt, synthetic construct
  source 1..22: mol_type = other RNA
acatagatattgtgatttttta

SEQ ID NO: 19510 - RNA, 22 nt, synthetic construct
  source 1..22: mol_type = other RNA
catagatattgtgattttttaa

SEQ ID NO: 19511 - RNA, 22 nt, synthetic construct
  source 1..22: mol_type = other RNA
tgattttttaatttttatttta

SEQ ID NO: 19512 - RNA, 22 nt, synthetic construct
  source 1..22: mol_type = other RNA
tttaatttttattttattattt

SEQ ID NO: 19513 - RNA, 22 nt, synthetic construct
  source 1..22: mol_type = other RNA
ttaatttttattttattattta

SEQ ID NO: 19514 - RNA, 22 nt, synthetic construct
  source 1..22: mol_type = other RNA
taatttttattttattatttat

SEQ ID NO: 19515 - RNA, 22 nt, synthetic construct
  source 1..22: mol_type = other RNA
aatttttattttattatttatt

SEQ ID NO: 19516 - RNA, 22 nt, synthetic construct
  source 1..22: mol_type = other RNA
atttttattttattatttattt

SEQ ID NO: 19517 - RNA, 22 nt, synthetic construct
  source 1..22: mol_type = other RNA
ttattttattatttatttattg

SEQ ID NO: 19518 - RNA, 22 nt, synthetic construct
  source 1..22: mol_type = other RNA
tattttattatttatttattgt

SEQ ID NO: 19519 - RNA, 22 nt, synthetic construct
  source 1..22: mol_type = other RNA
attttattatttatttattgtt

SEQ ID NO: 19520 - RNA, 22 nt, synthetic construct
  source 1..22: mol_type = other RNA
ttttattatttatttattgttg

SEQ ID NO: 19521 - RNA, 22 nt, synthetic construct
  source 1..22: mol_type = other RNA
tattatttatttattgttgaga

SEQ ID NO: 19522 - RNA, 22 nt, synthetic construct
  source 1..22: mol_type = other RNA
attatttatttattgttgagat

SEQ ID NO: 19523 - RNA, 22 nt, synthetic construct
  source 1..22: mol_type = other RNA
ttatttatttattgttgagatg

SEQ ID NO: 19524 - RNA, 22 nt, synthetic construct
  source 1..22: mol_type = other RNA
tttatttattgttgagatggag

SEQ ID NO: 19525 - RNA, 22 nt, synthetic construct
  source 1..22: mol_type = other RNA
atttattgttgagatggagtct

SEQ ID NO: 19526 - RNA, 22 nt, synthetic construct
  source 1..22: mol_type = other RNA
tttattgttgagatggagtctc

SEQ ID NO: 19527 - RNA, 22 nt, synthetic construct
  source 1..22: mol_type = other RNA
attgttgagatggagtctcact

SEQ ID NO: 19528 - RNA, 22 nt, synthetic construct
  source 1..22: mol_type = other RNA
ttgttgagatggagtctcactc

SEQ ID NO: 19529 - RNA, 22 nt, synthetic construct
  source 1..22: mol_type = other RNA
ttgagatggagtctcactctgt

SEQ ID NO: 19530 - RNA, 22 nt, synthetic construct
  source 1..22: mol_type = other RNA
agatggagtctcactctgttgc

SEQ ID NO: 19531 - RNA, 22 nt, synthetic construct
  source 1..22: mol_type = other RNA
cccaggctagagtgcagtggtg

SEQ ID NO: 19532 - RNA, 22 nt, synthetic construct
  source 1..22: mol_type = other RNA
aagtgattctcctgcctcagcc

SEQ ID NO: 19533 - RNA, 22 nt, synthetic construct
  source 1..22: mol_type = other RNA
tcctgcctcagcctccggagca

SEQ ID NO: 19534 - RNA, 22 nt, synthetic construct
  source 1..22: mol_type = other RNA
caggtgtgcaccgtcacaccca

SEQ ID NO: 19535 - RNA, 22 nt, synthetic construct
  source 1..22: mol_type = other RNA
ttgtaatttcagtagagacaag

SEQ ID NO: 19536 - RNA, 22 nt, synthetic construct
  source 1..22: mol_type = other RNA
tgtaatttcagtagagacaagt

SEQ ID NO: 19537 - RNA, 22 nt, synthetic construct
  source 1..22: mol_type = other RNA
gtaatttcagtagagacaagtt

SEQ ID NO: 19538 - RNA, 22 nt, synthetic construct
  source 1..22: mol_type = other RNA
taatttcagtagagacaagttt

SEQ ID NO: 19539 - RNA, 22 nt, synthetic construct
  source 1..22: mol_type = other RNA
cagtagagacaagtttaaccat

SEQ ID NO: 19540 - RNA, 22 nt, synthetic construct
  source 1..22: mol_type = other RNA
agtagagacaagtttaaccatg

SEQ ID NO: 19541 - RNA, 22 nt, synthetic construct
  source 1..22: mol_type = other RNA
aaccatgttggccaggctggtc

SEQ ID NO: 19542 - RNA, 22 nt, synthetic construct
  source 1..22: mol_type = other RNA
accatgttggccaggctggtct

SEQ ID NO: 19543 - RNA, 22 nt, synthetic construct
  source 1..22: mol_type = other RNA
gccaggctggtctcgaactcct

SEQ ID NO: 19544 - RNA, 22 nt, synthetic construct
  source 1..22: mol_type = other RNA
caggtgtgagccactgcaccca

SEQ ID NO: 19545 - RNA, 22 nt, synthetic construct
  source 1..22: mol_type = other RNA
cgattttcttttttaaacatga

SEQ ID NO: 19546 - RNA, 22 nt, synthetic construct
  source 1..22: mol_type = other RNA
tcttttttaaacatgagtgaaa

SEQ ID NO: 19547 - RNA, 22 nt, synthetic construct
  source 1..22: mol_type = other RNA
cttttttaaacatgagtgaaat

SEQ ID NO: 19548 - RNA, 22 nt, synthetic construct
  source 1..22: mol_type = other RNA
ttttttaaacatgagtgaaatt

SEQ ID NO: 19549 - RNA, 22 nt, synthetic construct
  source 1..22: mol_type = other RNA
ttaaacatgagtgaaattttta

SEQ ID NO: 19550 - RNA, 22 nt, synthetic construct
  source 1..22: mol_type = other RNA
taaacatgagtgaaatttttaa

SEQ ID NO: 19551 - RNA, 22 nt, synthetic construct
  source 1..22: mol_type = other RNA
aaacatgagtgaaatttttaaa

SEQ ID NO: 19552 - RNA, 22 nt, synthetic construct
  source 1..22: mol_type = other RNA
aacatgagtgaaatttttaaaa

SEQ ID NO: 19553 - RNA, 22 nt, synthetic construct
  source 1..22: mol_type = other RNA
ttaaaagtacagttggccaaag

SEQ ID NO: 19554 - RNA, 22 nt, synthetic construct
  source 1..22: mol_type = other RNA
taaaagtacagttggccaaaga

SEQ ID NO: 19555 - RNA, 22 nt, synthetic construct
  source 1..22: mol_type = other RNA
aaaagtacagttggccaaagaa

SEQ ID NO: 19556 - RNA, 22 nt, synthetic construct
  source 1..22: mol_type = other RNA
aaagtacagttggccaaagaaa

SEQ ID NO: 19557 - RNA, 22 nt, synthetic construct
  source 1..22: mol_type = other RNA
gccaaagaaagacatatttgag

SEQ ID NO: 19558 - RNA, 22 nt, synthetic construct
  source 1..22: mol_type = other RNA
gagttagatacagcctcaggcc

SEQ ID NO: 19559 - RNA, 22 nt, synthetic construct
  source 1..22: mol_type = other RNA
agttagatacagcctcaggccg

SEQ ID NO: 19560 - RNA, 22 nt, synthetic construct
  source 1..22: mol_type = other RNA
gatacagcctcaggccgctatc

SEQ ID NO: 19561 - RNA, 22 nt, synthetic construct
  source 1..22: mol_type = other RNA
ctcattcacttgacacttattc

SEQ ID NO: 19562 - RNA, 22 nt, synthetic construct
  source 1..22: mol_type = other RNA
acttgacacttattcaacccct

SEQ ID NO: 19563 - RNA, 22 nt, synthetic construct
  source 1..22: mol_type = other RNA
aaccccttctttgttggctcac

SEQ ID NO: 19564 - RNA, 22 nt, synthetic construct
  source 1..22: mol_type = other RNA
ttggctcacacactcatttatt

SEQ ID NO: 19565 - RNA, 22 nt, synthetic construct
  source 1..22: mol_type = other RNA
gctcacacactcatttatttat

SEQ ID NO: 19566 - RNA, 22 nt, synthetic construct
  source 1..22: mol_type = other RNA
atttattcattcattcattcat

SEQ ID NO: 19567 - RNA, 22 nt, synthetic construct
  source 1..22: mol_type = other RNA
tttattcattcattcattcatt

SEQ ID NO: 19568 - RNA, 22 nt, synthetic construct
  source 1..22: mol_type = other RNA
attcattcattcattcattcac

SEQ ID NO: 19569 - RNA, 22 nt, synthetic construct
  source 1..22: mol_type = other RNA
ttcattcattcattcattcact

SEQ ID NO: 19570 - RNA, 22 nt, synthetic construct
  source 1..22: mol_type = other RNA
attcattcattcattcacttat

SEQ ID NO: 19571 - RNA, 22 nt, synthetic construct
  source 1..22: mol_type = other RNA
attcattcattcacttatttga

SEQ ID NO: 19572 - RNA, 22 nt, synthetic construct
  source 1..22: mol_type = other RNA
attcattcacttatttgattat

SEQ ID NO: 19573 - RNA, 22 nt, synthetic construct
  source 1..22: mol_type = other RNA
attcacttatttgattatgcca

SEQ ID NO: 19574 - RNA, 22 nt, synthetic construct
  source 1..22: mol_type = other RNA
acttatttgattatgccatcat

SEQ ID NO: 19575 - RNA, 22 nt, synthetic construct
  source 1..22: mol_type = other RNA
gattatgccatcatttcaccat

SEQ ID NO: 19576 - RNA, 22 nt, synthetic construct
  source 1..22: mol_type = other RNA
attatgccatcatttcaccatt

SEQ ID NO: 19577 - RNA, 22 nt, synthetic construct
  source 1..22: mol_type = other RNA
tgccatcatttcaccattcact

SEQ ID NO: 19578 - RNA, 22 nt, synthetic construct
  source 1..22: mol_type = other RNA
caccattcactccaccactccc

SEQ ID NO: 19579 - RNA, 22 nt, synthetic construct
  source 1..22: mol_type = other RNA
accattcactccaccactccct

SEQ ID NO: 19580 - RNA, 22 nt, synthetic construct
  source 1..22: mol_type = other RNA
actccaccactccctcaaataa

SEQ ID NO: 19581 - RNA, 22 nt, synthetic construct
  source 1..22: mol_type = other RNA
attgcccttcaataagcctgca

SEQ ID NO: 19582 - RNA, 22 nt, synthetic construct
  source 1..22: mol_type = other RNA
ttgcccttcaataagcctgcac

SEQ ID NO: 19583 - RNA, 22 nt, synthetic construct
  source 1..22: mol_type = other RNA
cccttcaataagcctgcactgg

SEQ ID NO: 19584 - RNA, 22 nt, synthetic construct
  source 1..22: mol_type = other RNA
acacttcattgtcaggctgaga

SEQ ID NO: 19585 - RNA, 22 nt, synthetic construct
  source 1..22: mol_type = other RNA
tcaggctgagagaatgaatgag

SEQ ID NO: 19586 - RNA, 22 nt, synthetic construct
  source 1..22: mol_type = other RNA
atgaggatgggagcaatggaaa

SEQ ID NO: 19587 - RNA, 22 nt, synthetic construct
  source 1..22: mol_type = other RNA
ctaaattactaaatgcttactc

SEQ ID NO: 19588 - RNA, 22 nt, synthetic construct
  source 1..22: mol_type = other RNA
ctaaatgcttactctcacatac

SEQ ID NO: 19589 - RNA, 22 nt, synthetic construct
  source 1..22: mol_type = other RNA
ggtatgctaaatcattaacatc

SEQ ID NO: 19590 - RNA, 22 nt, synthetic construct
  source 1..22: mol_type = other RNA
acatctcacacaatcccaatat

SEQ ID NO: 19591 - RNA, 22 nt, synthetic construct
  source 1..22: mol_type = other RNA
tccccattttccagatgaggct

SEQ ID NO: 19592 - RNA, 22 nt, synthetic construct
  source 1..22: mol_type = other RNA
tccagatgaggctactgaggca

SEQ ID NO: 19593 - RNA, 22 nt, synthetic construct
  source 1..22: mol_type = other RNA
ccagatgaggctactgaggcat

SEQ ID NO: 19594 - RNA, 22 nt, synthetic construct
  source 1..22: mol_type = other RNA
cagatgaggctactgaggcatg

SEQ ID NO: 19595 - RNA, 22 nt, synthetic construct
  source 1..22: mol_type = other RNA
ctccagcaagtggtagaaccgg

SEQ ID NO: 19596 - RNA, 22 nt, synthetic construct
  source 1..22: mol_type = other RNA
gaacccagacacgtgggctcca

SEQ ID NO: 19597 - RNA, 22 nt, synthetic construct
  source 1..22: mol_type = other RNA
aacccagacacgtgggctccac

SEQ ID NO: 19598 - RNA, 22 nt, synthetic construct
  source 1..22: mol_type = other RNA
ggaggccaaggcaggtggatca

SEQ ID NO: 19599 - RNA, 22 nt, synthetic construct
  source 1..22: mol_type = other RNA
gagaccagcctggccaacatag

SEQ ID NO: 19600 - RNA, 22 nt, synthetic construct
  source 1..22: mol_type = other RNA
aaaaatacaaaaattagccaga

SEQ ID NO: 19601 - RNA, 22 nt, synthetic construct
  source 1..22: mol_type = other RNA
gccagacgtggtagtgggtgcc

SEQ ID NO: 19602 - RNA, 22 nt, synthetic construct
  source 1..22: mol_type = other RNA
ccgtgagctgagattgcgccag

SEQ ID NO: 19603 - RNA, 22 nt, synthetic construct
  source 1..22: mol_type = other RNA
cgccagtgcactccagcctggg

SEQ ID NO: 19604 - RNA, 22 nt, synthetic construct
  source 1..22: mol_type = other RNA
ggaggccaaggcggaacgattg

SEQ ID NO: 19605 - RNA, 22 nt, synthetic construct
  source 1..22: mol_type = other RNA
cttgagcccaggagctcaagac

SEQ ID NO: 19606 - RNA, 22 nt, synthetic construct
  source 1..22: mol_type = other RNA
gccaggcatggcagtgggcgcc

SEQ ID NO: 19607 - RNA, 22 nt, synthetic construct
  source 1..22: mol_type = other RNA
cttgagcctgtgaggttgaagc

SEQ ID NO: 19608 - RNA, 22 nt, synthetic construct
  source 1..22: mol_type = other RNA
aagctgtggtggaccatgattg

SEQ ID NO: 19609 - RNA, 22 nt, synthetic construct
  source 1..22: mol_type = other RNA
tgccattgcacgccagcctggg

SEQ ID NO: 19610 - RNA, 22 nt, synthetic construct
  source 1..22: mol_type = other RNA
cacgccagcctgggcgacatag

SEQ ID NO: 19611 - RNA, 22 nt, synthetic construct
  source 1..22: mol_type = other RNA
tctgggcatggtgtcacatgtc

SEQ ID NO: 19612 - RNA, 22 nt, synthetic construct
  source 1..22: mol_type = other RNA
aggttgcagcgagctgtgatca

SEQ ID NO: 19613 - RNA, 22 nt, synthetic construct
  source 1..22: mol_type = other RNA
cagcgagctgtgatcacaccac

SEQ ID NO: 19614 - RNA, 22 nt, synthetic construct
  source 1..22: mol_type = other RNA
cagcctgggcaaaaaagccaga

SEQ ID NO: 19615 - RNA, 22 nt, synthetic construct
  source 1..22: mol_type = other RNA
cagagccggtggagcagttcta

SEQ ID NO: 19616 - RNA, 22 nt, synthetic construct
  source 1..22: mol_type = other RNA
taccgctcactgcaggacacgt

SEQ ID NO: 19617 - RNA, 22 nt, synthetic construct
  source 1..22: mol_type = other RNA
gctgccaaggagcaccggcggc

SEQ ID NO: 19618 - RNA, 22 nt, synthetic construct
  source 1..22: mol_type = other RNA
ctgtgctgggcaaagctggtca

SEQ ID NO: 19619 - RNA, 22 nt, synthetic construct
  source 1..22: mol_type = other RNA
ggctggggcagtgagccgggcc

SEQ ID NO: 19620 - RNA, 22 nt, synthetic construct
  source 1..22: mol_type = other RNA
tcttctctgtcccctgccattg

SEQ ID NO: 19621 - RNA, 22 nt, synthetic construct
  source 1..22: mol_type = other RNA
cttgaaccgtccgggggatgcc

SEQ ID NO: 19622 - RNA, 22 nt, synthetic construct
  source 1..22: mol_type = other RNA
tcagccacatcttgaagagacc

SEQ ID NO: 19623 - RNA, 22 nt, synthetic construct
  source 1..22: mol_type = other RNA
cagccacatcttgaagagacct

SEQ ID NO: 19624 - RNA, 22 nt, synthetic construct
  source 1..22: mol_type = other RNA
agccacatcttgaagagacctg

SEQ ID NO: 19625 - RNA, 22 nt, synthetic construct
  source 1..22: mol_type = other RNA
tgctcatcctagacggcttcga

SEQ ID NO: 19626 - RNA, 22 nt, synthetic construct
  source 1..22: mol_type = other RNA
ccagaagaagctgctccgaggt

SEQ ID NO: 19627 - RNA, 22 nt, synthetic construct
  source 1..22: mol_type = other RNA
cagaagaagctgctccgaggtt

SEQ ID NO: 19628 - RNA, 22 nt, synthetic construct
  source 1..22: mol_type = other RNA
caccctcctcctcacagcccgg

SEQ ID NO: 19629 - RNA, 22 nt, synthetic construct
  source 1..22: mol_type = other RNA
gagctgtccggcttctccatgg

SEQ ID NO: 19630 - RNA, 22 nt, synthetic construct
  source 1..22: mol_type = other RNA
agctgtccggcttctccatgga

SEQ ID NO: 19631 - RNA, 22 nt, synthetic construct
  source 1..22: mol_type = other RNA
agagctcagggatgacagagca

SEQ ID NO: 19632 - RNA, 22 nt, synthetic construct
  source 1..22: mol_type = other RNA
tgccgggcagtgtgccagctct

SEQ ID NO: 19633 - RNA, 22 nt, synthetic construct
  source 1..22: mol_type = other RNA
ccatccgcagacgtgaggacct

SEQ ID NO: 19634 - RNA, 22 nt, synthetic construct
  source 1..22: mol_type = other RNA
accccaaggaagaagaggccct

SEQ ID NO: 19635 - RNA, 22 nt, synthetic construct
  source 1..22: mol_type = other RNA
tggctgggctgatcttccagcc

SEQ ID NO: 19636 - RNA, 22 nt, synthetic construct
  source 1..22: mol_type = other RNA
ggcagcacgtggtacaggagct

SEQ ID NO: 19637 - RNA, 22 nt, synthetic construct
  source 1..22: mol_type = other RNA
gcagcacgtggtacaggagctc

SEQ ID NO: 19638 - RNA, 22 nt, synthetic construct
  source 1..22: mol_type = other RNA
ctgggcacccgcctcacgcctc

SEQ ID NO: 19639 - RNA, 22 nt, synthetic construct
  source 1..22: mol_type = other RNA
tgggcacccgcctcacgcctcc

SEQ ID NO: 19640 - RNA, 22 nt, synthetic construct
  source 1..22: mol_type = other RNA
gcccctctggattggggagcct

SEQ ID NO: 19641 - RNA, 22 nt, synthetic construct
  source 1..22: mol_type = other RNA
cccctctggattggggagcctc

SEQ ID NO: 19642 - RNA, 22 nt, synthetic construct
  source 1..22: mol_type = other RNA
gggagcctcgtgggactcagct

SEQ ID NO: 19643 - RNA, 22 nt, synthetic construct
  source 1..22: mol_type = other RNA
caggtggggtgaggggcttggg

SEQ ID NO: 19644 - RNA, 22 nt, synthetic construct
  source 1..22: mol_type = other RNA
aggtggggtgaggggcttgggg

SEQ ID NO: 19645 - RNA, 22 nt, synthetic construct
  source 1..22: mol_type = other RNA
ggcattaactgcggtcttggtg

SEQ ID NO: 19646 - RNA, 22 nt, synthetic construct
  source 1..22: mol_type = other RNA
actgcggtcttggtgccaagcc

SEQ ID NO: 19647 - RNA, 22 nt, synthetic construct
  source 1..22: mol_type = other RNA
agtatgcagagcagccgggtgg

SEQ ID NO: 19648 - RNA, 22 nt, synthetic construct
  source 1..22: mol_type = other RNA
gtatgcagagcagccgggtggg

SEQ ID NO: 19649 - RNA, 22 nt, synthetic construct
  source 1..22: mol_type = other RNA
tctccatttttaagatgaggat

SEQ ID NO: 19650 - RNA, 22 nt, synthetic construct
  source 1..22: mol_type = other RNA
ttaagatgaggatgttgaggct

SEQ ID NO: 19651 - RNA, 22 nt, synthetic construct
  source 1..22: mol_type = other RNA
taagatgaggatgttgaggctc

SEQ ID NO: 19652 - RNA, 22 nt, synthetic construct
  source 1..22: mol_type = other RNA
aagatgaggatgttgaggctca

SEQ ID NO: 19653 - RNA, 22 nt, synthetic construct
  source 1..22: mol_type = other RNA
agatgaggatgttgaggctcag

SEQ ID NO: 19654 - RNA, 22 nt, synthetic construct
  source 1..22: mol_type = other RNA
aggctcagagaggggcagccac

SEQ ID NO: 19655 - RNA, 22 nt, synthetic construct
  source 1..22: mol_type = other RNA
tcccagtcaatatttgaaggcc

SEQ ID NO: 19656 - RNA, 22 nt, synthetic construct
  source 1..22: mol_type = other RNA
gaaggcccgccatgtgccagtc

SEQ ID NO: 19657 - RNA, 22 nt, synthetic construct
  source 1..22: mol_type = other RNA
aaggcccgccatgtgccagtca

SEQ ID NO: 19658 - RNA, 22 nt, synthetic construct
  source 1..22: mol_type = other RNA
gttttattctttccaccccctg

SEQ ID NO: 19659 - RNA, 22 nt, synthetic construct
  source 1..22: mol_type = other RNA
ttttattctttccaccccctga

SEQ ID NO: 19660 - RNA, 22 nt, synthetic construct
  source 1..22: mol_type = other RNA
tattctttccaccccctgagca

SEQ ID NO: 19661 - RNA, 22 nt, synthetic construct
  source 1..22: mol_type = other RNA
attctttccaccccctgagcac

SEQ ID NO: 19662 - RNA, 22 nt, synthetic construct
  source 1..22: mol_type = other RNA
ttctttccaccccctgagcacg

SEQ ID NO: 19663 - RNA, 22 nt, synthetic construct
  source 1..22: mol_type = other RNA
tttccaccccctgagcacgcca

SEQ ID NO: 19664 - RNA, 22 nt, synthetic construct
  source 1..22: mol_type = other RNA
caccccctgagcacgccaccgt

SEQ ID NO: 19665 - RNA, 22 nt, synthetic construct
  source 1..22: mol_type = other RNA
tcttatgctaagagtaaagcca

SEQ ID NO: 19666 - RNA, 22 nt, synthetic construct
  source 1..22: mol_type = other RNA
cttatgctaagagtaaagccat

SEQ ID NO: 19667 - RNA, 22 nt, synthetic construct
  source 1..22: mol_type = other RNA
ttatgctaagagtaaagccatg

SEQ ID NO: 19668 - RNA, 22 nt, synthetic construct
  source 1..22: mol_type = other RNA
tctcctcttccactccattttg

SEQ ID NO: 19669 - RNA, 22 nt, synthetic construct
  source 1..22: mol_type = other RNA
tgtattcagcaaccagaccaat

SEQ ID NO: 19670 - RNA, 22 nt, synthetic construct
  source 1..22: mol_type = other RNA
gtattcagcaaccagaccaatc

SEQ ID NO: 19671 - RNA, 22 nt, synthetic construct
  source 1..22: mol_type = other RNA
tattcagcaaccagaccaatct

SEQ ID NO: 19672 - RNA, 22 nt, synthetic construct
  source 1..22: mol_type = other RNA
agcaaccagaccaatcttctca

SEQ ID NO: 19673 - RNA, 22 nt, synthetic construct
  source 1..22: mol_type = other RNA
tatcccatccctgcttacaatc

SEQ ID NO: 19674 - RNA, 22 nt, synthetic construct
  source 1..22: mol_type = other RNA
cttaatttggtttcattaagtc

SEQ ID NO: 19675 - RNA, 22 nt, synthetic construct
  source 1..22: mol_type = other RNA
ggtttcattaagtcggtctgca

SEQ ID NO: 19676 - RNA, 22 nt, synthetic construct
  source 1..22: mol_type = other RNA
gtttcattaagtcggtctgcaa

SEQ ID NO: 19677 - RNA, 22 nt, synthetic construct
  source 1..22: mol_type = other RNA
cattaagtcggtctgcaatctg

SEQ ID NO: 19678 - RNA, 22 nt, synthetic construct
  source 1..22: mol_type = other RNA
attaagtcggtctgcaatctgc

SEQ ID NO: 19679 - RNA, 22 nt, synthetic construct
  source 1..22: mol_type = other RNA
agtcggtctgcaatctgcttga

SEQ ID NO: 19680 - RNA, 22 nt, synthetic construct
  source 1..22: mol_type = other RNA
cagcttaatcgccagaggattg

SEQ ID NO: 19681 - RNA, 22 nt, synthetic construct
  source 1..22: mol_type = other RNA
agcttaatcgccagaggattgc

SEQ ID NO: 19682 - RNA, 22 nt, synthetic construct
  source 1..22: mol_type = other RNA
cttccatatttccccctaaaca

SEQ ID NO: 19683 - RNA, 22 nt, synthetic construct
  source 1..22: mol_type = other RNA
ccccctaaacatactttaccca

SEQ ID NO: 19684 - RNA, 22 nt, synthetic construct
  source 1..22: mol_type = other RNA
cccctaaacatactttacccaa

SEQ ID NO: 19685 - RNA, 22 nt, synthetic construct
  source 1..22: mol_type = other RNA
cccaagctgtaaggtcctacat

SEQ ID NO: 19686 - RNA, 22 nt, synthetic construct
  source 1..22: mol_type = other RNA
tgccaataatttagcagtgagc

SEQ ID NO: 19687 - RNA, 22 nt, synthetic construct
  source 1..22: mol_type = other RNA
agcagtgagcttcctggtagcc

SEQ ID NO: 19688 - RNA, 22 nt, synthetic construct
  source 1..22: mol_type = other RNA
gcagtgagcttcctggtagccg

SEQ ID NO: 19689 - RNA, 22 nt, synthetic construct
  source 1..22: mol_type = other RNA
tgagaaagtaggaatcaataaa

SEQ ID NO: 19690 - RNA, 22 nt, synthetic construct
  source 1..22: mol_type = other RNA
tgggaaaggtagaggttgagct

SEQ ID NO: 19691 - RNA, 22 nt, synthetic construct
  source 1..22: mol_type = other RNA
agctaaggaaagaaagtatttt

SEQ ID NO: 19692 - RNA, 22 nt, synthetic construct
  source 1..22: mol_type = other RNA
taataggtaggaggacccttca

SEQ ID NO: 19693 - RNA, 22 nt, synthetic construct
  source 1..22: mol_type = other RNA
aataggtaggaggacccttcat

SEQ ID NO: 19694 - RNA, 22 nt, synthetic construct
  source 1..22: mol_type = other RNA
ataggtaggaggacccttcatg

SEQ ID NO: 19695 - RNA, 22 nt, synthetic construct
  source 1..22: mol_type = other RNA
aggtctagcctggtcaccgtgc

SEQ ID NO: 19696 - RNA, 22 nt, synthetic construct
  source 1..22: mol_type = other RNA
accatcgagcctttcaaagcca

SEQ ID NO: 19697 - RNA, 22 nt, synthetic construct
  source 1..22: mol_type = other RNA
aaagccaagtccctgaaggatg

SEQ ID NO: 19698 - RNA, 22 nt, synthetic construct
  source 1..22: mol_type = other RNA
acgccatgcaggttgaggacat

SEQ ID NO: 19699 - RNA, 22 nt, synthetic construct
  source 1..22: mol_type = other RNA
aggacatgtaggacccattctc

SEQ ID NO: 19700 - RNA, 22 nt, synthetic construct
  source 1..22: mol_type = other RNA
tcaagtttgtcatgggcatttc

SEQ ID NO: 19701 - RNA, 22 nt, synthetic construct
  source 1..22: mol_type = other RNA
gtcatgggcatttccagtgccc

SEQ ID NO: 19702 - RNA, 22 nt, synthetic construct
  source 1..22: mol_type = other RNA
tcatgggcatttccagtgcccc

SEQ ID NO: 19703 - RNA, 22 nt, synthetic construct
  source 1..22: mol_type = other RNA
ccagtgccccctgtcctctggg

SEQ ID NO: 19704 - RNA, 22 nt, synthetic construct
  source 1..22: mol_type = other RNA
cagtgccccctgtcctctggga

SEQ ID NO: 19705 - RNA, 22 nt, synthetic construct
  source 1..22: mol_type = other RNA
tgggcaatggctaaccagagtc

SEQ ID NO: 19706 - RNA, 22 nt, synthetic construct
  source 1..22: mol_type = other RNA
aaaactttgctgcattcaaaac

SEQ ID NO: 19707 - RNA, 22 nt, synthetic construct
  source 1..22: mol_type = other RNA
ctgcattcaaaacctgccatca

SEQ ID NO: 19708 - RNA, 22 nt, synthetic construct
  source 1..22: mol_type = other RNA
aaaacctgccatcatgtgccca

SEQ ID NO: 19709 - RNA, 22 nt, synthetic construct
  source 1..22: mol_type = other RNA
aggcatttaggacaactgttgt

SEQ ID NO: 19710 - RNA, 22 nt, synthetic construct
  source 1..22: mol_type = other RNA
aggacaactgttgtcccaaatt

SEQ ID NO: 19711 - RNA, 22 nt, synthetic construct
  source 1..22: mol_type = other RNA
ggacaactgttgtcccaaattt

SEQ ID NO: 19712 - RNA, 22 nt, synthetic construct
  source 1..22: mol_type = other RNA
tcccaaatttatagacggcaga

SEQ ID NO: 19713 - RNA, 22 nt, synthetic construct
  source 1..22: mol_type = other RNA
atagacggcagagctaaggtcc

SEQ ID NO: 19714 - RNA, 22 nt, synthetic construct
  source 1..22: mol_type = other RNA
tagacggcagagctaaggtcca

SEQ ID NO: 19715 - RNA, 22 nt, synthetic construct
  source 1..22: mol_type = other RNA
cagaacaagttaactgtctttc

SEQ ID NO: 19716 - RNA, 22 nt, synthetic construct
  source 1..22: mol_type = other RNA
actgtctttcattcattccttc

SEQ ID NO: 19717 - RNA, 22 nt, synthetic construct
  source 1..22: mol_type = other RNA
attcattccttcatcacacatt

SEQ ID NO: 19718 - RNA, 22 nt, synthetic construct
  source 1..22: mol_type = other RNA
attccttcatcacacattgttt

SEQ ID NO: 19719 - RNA, 22 nt, synthetic construct
  source 1..22: mol_type = other RNA
cttcatcacacattgtttgagc

SEQ ID NO: 19720 - RNA, 22 nt, synthetic construct
  source 1..22: mol_type = other RNA
tttgagcgcctcttaagtgctg

SEQ ID NO: 19721 - RNA, 22 nt, synthetic construct
  source 1..22: mol_type = other RNA
gagcgcctcttaagtgctgtct

SEQ ID NO: 19722 - RNA, 22 nt, synthetic construct
  source 1..22: mol_type = other RNA
agcgcctcttaagtgctgtctg

SEQ ID NO: 19723 - RNA, 22 nt, synthetic construct
  source 1..22: mol_type = other RNA
ccatgaaagatacagtcctgag

SEQ ID NO: 19724 - RNA, 22 nt, synthetic construct
  source 1..22: mol_type = other RNA
catgaaagatacagtcctgaga

SEQ ID NO: 19725 - RNA, 22 nt, synthetic construct
  source 1..22: mol_type = other RNA
atttttatttttattatttctt

SEQ ID NO: 19726 - RNA, 22 nt, synthetic construct
  source 1..22: mol_type = other RNA
tttttatttttattatttctta

SEQ ID NO: 19727 - RNA, 22 nt, synthetic construct
  source 1..22: mol_type = other RNA
ttatttttattatttcttaaag

SEQ ID NO: 19728 - RNA, 22 nt, synthetic construct
  source 1..22: mol_type = other RNA
tatttttattatttcttaaaga

SEQ ID NO: 19729 - RNA, 22 nt, synthetic construct
  source 1..22: mol_type = other RNA
atttttattatttcttaaagac

SEQ ID NO: 19730 - RNA, 22 nt, synthetic construct
  source 1..22: mol_type = other RNA
tttttattatttcttaaagaca

SEQ ID NO: 19731 - RNA, 22 nt, synthetic construct
  source 1..22: mol_type = other RNA
ttattatttcttaaagacaggg

SEQ ID NO: 19732 - RNA, 22 nt, synthetic construct
  source 1..22: mol_type = other RNA
tattatttcttaaagacagggt

SEQ ID NO: 19733 - RNA, 22 nt, synthetic construct
  source 1..22: mol_type = other RNA
attatttcttaaagacagggtc

SEQ ID NO: 19734 - RNA, 22 nt, synthetic construct
  source 1..22: mol_type = other RNA
ttatttcttaaagacagggtct

SEQ ID NO: 19735 - RNA, 22 nt, synthetic construct
  source 1..22: mol_type = other RNA
tttcttaaagacagggtctcgc

SEQ ID NO: 19736 - RNA, 22 nt, synthetic construct
  source 1..22: mol_type = other RNA
cttaaagacagggtctcgctgt

SEQ ID NO: 19737 - RNA, 22 nt, synthetic construct
  source 1..22: mol_type = other RNA
ttaaagacagggtctcgctgtg

SEQ ID NO: 19738 - RNA, 22 nt, synthetic construct
  source 1..22: mol_type = other RNA
taggtgcacgtcatcacaccgg

SEQ ID NO: 19739 - RNA, 22 nt, synthetic construct
  source 1..22: mol_type = other RNA
tttaagtttttgtagacacagg

SEQ ID NO: 19740 - RNA, 22 nt, synthetic construct
  source 1..22: mol_type = other RNA
ttaagtttttgtagacacaggg

SEQ ID NO: 19741 - RNA, 22 nt, synthetic construct
  source 1..22: mol_type = other RNA
taagtttttgtagacacaggga

SEQ ID NO: 19742 - RNA, 22 nt, synthetic construct
  source 1..22: mol_type = other RNA
aagtttttgtagacacagggat

SEQ ID NO: 19743 - RNA, 22 nt, synthetic construct
  source 1..22: mol_type = other RNA
agtttttgtagacacagggatc

SEQ ID NO: 19744 - RNA, 22 nt, synthetic construct
  source 1..22: mol_type = other RNA
ttgtagacacagggatcttgct

SEQ ID NO: 19745 - RNA, 22 nt, synthetic construct
  source 1..22: mol_type = other RNA
tgtagacacagggatcttgcta

SEQ ID NO: 19746 - RNA, 22 nt, synthetic construct
  source 1..22: mol_type = other RNA
gtagacacagggatcttgctat

SEQ ID NO: 19747 - RNA, 22 nt, synthetic construct
  source 1..22: mol_type = other RNA
tagacacagggatcttgctatg

SEQ ID NO: 19748 - RNA, 22 nt, synthetic construct
  source 1..22: mol_type = other RNA
cccaggctggtcttgaactcct

SEQ ID NO: 19749 - RNA, 22 nt, synthetic construct
  source 1..22: mol_type = other RNA
tttttaagagggggacaacagt

SEQ ID NO: 19750 - RNA, 22 nt, synthetic construct
  source 1..22: mol_type = other RNA
ttttaagagggggacaacagtt

SEQ ID NO: 19751 - RNA, 22 nt, synthetic construct
  source 1..22: mol_type = other RNA
tttaagagggggacaacagttg

SEQ ID NO: 19752 - RNA, 22 nt, synthetic construct
  source 1..22: mol_type = other RNA
ttaagagggggacaacagttgc

SEQ ID NO: 19753 - RNA, 22 nt, synthetic construct
  source 1..22: mol_type = other RNA
taagagggggacaacagttgcc

SEQ ID NO: 19754 - RNA, 22 nt, synthetic construct
  source 1..22: mol_type = other RNA
aagagggggacaacagttgccc

SEQ ID NO: 19755 - RNA, 22 nt, synthetic construct
  source 1..22: mol_type = other RNA
agagggggacaacagttgcccc

SEQ ID NO: 19756 - RNA, 22 nt, synthetic construct
  source 1..22: mol_type = other RNA
ccccaaggaaagcaatccccct

SEQ ID NO: 19757 - RNA, 22 nt, synthetic construct
  source 1..22: mol_type = other RNA
ggggcactggggcagccatcat

SEQ ID NO: 19758 - RNA, 22 nt, synthetic construct
  source 1..22: mol_type = other RNA
gggcactggggcagccatcatg

SEQ ID NO: 19759 - RNA, 22 nt, synthetic construct
  source 1..22: mol_type = other RNA
cctgttctctccaggacgagaa

SEQ ID NO: 19760 - RNA, 22 nt, synthetic construct
  source 1..22: mol_type = other RNA
tctccaggacgagaagttcctc

SEQ ID NO: 19761 - RNA, 22 nt, synthetic construct
  source 1..22: mol_type = other RNA
ctcggaagacacagctggggag

SEQ ID NO: 19762 - RNA, 22 nt, synthetic construct
  source 1..22: mol_type = other RNA
gggacctaaagaaactggagtt

SEQ ID NO: 19763 - RNA, 22 nt, synthetic construct
  source 1..22: mol_type = other RNA
gcgtaagcaaaggggtggattg

SEQ ID NO: 19764 - RNA, 22 nt, synthetic construct
  source 1..22: mol_type = other RNA
cgtaagcaaaggggtggattgt

SEQ ID NO: 19765 - RNA, 22 nt, synthetic construct
  source 1..22: mol_type = other RNA
tcttgtgggtctgcgcaaggtt

SEQ ID NO: 19766 - RNA, 22 nt, synthetic construct
  source 1..22: mol_type = other RNA
cccctgcagcattagctgggct

SEQ ID NO: 19767 - RNA, 22 nt, synthetic construct
  source 1..22: mol_type = other RNA
ccctgcagcattagctgggctt

SEQ ID NO: 19768 - RNA, 22 nt, synthetic construct
  source 1..22: mol_type = other RNA
gctgggcttgtaccacctgaat

SEQ ID NO: 19769 - RNA, 22 nt, synthetic construct
  source 1..22: mol_type = other RNA
ttaccctcttgcccaccacttt

SEQ ID NO: 19770 - RNA, 22 nt, synthetic construct
  source 1..22: mol_type = other RNA
gaaatagcttccagcagctgga

SEQ ID NO: 19771 - RNA, 22 nt, synthetic construct
  source 1..22: mol_type = other RNA
tcagatttgaagctaatggacc

SEQ ID NO: 19772 - RNA, 22 nt, synthetic construct
  source 1..22: mol_type = other RNA
gaagctaatggacccgtttgct

SEQ ID NO: 19773 - RNA, 22 nt, synthetic construct
  source 1..22: mol_type = other RNA
aagctaatggacccgtttgctg

SEQ ID NO: 19774 - RNA, 22 nt, synthetic construct
  source 1..22: mol_type = other RNA
gctggttaacatggtcattccc

SEQ ID NO: 19775 - RNA, 22 nt, synthetic construct
  source 1..22: mol_type = other RNA
ctggttaacatggtcattccca

SEQ ID NO: 19776 - RNA, 22 nt, synthetic construct
  source 1..22: mol_type = other RNA
acatggtcattcccatcactca

SEQ ID NO: 19777 - RNA, 22 nt, synthetic construct
  source 1..22: mol_type = other RNA
ccatcactcattcaacagaggt

SEQ ID NO: 19778 - RNA, 22 nt, synthetic construct
  source 1..22: mol_type = other RNA
aacagaggtattgagcacttga

SEQ ID NO: 19779 - RNA, 22 nt, synthetic construct
  source 1..22: mol_type = other RNA
agcacttgaatgactgaggctg

SEQ ID NO: 19780 - RNA, 22 nt, synthetic construct
  source 1..22: mol_type = other RNA
caggaattgtaatttcgccagg

SEQ ID NO: 19781 - RNA, 22 nt, synthetic construct
  source 1..22: mol_type = other RNA
taatttcgccagggatcagaaa

SEQ ID NO: 19782 - RNA, 22 nt, synthetic construct
  source 1..22: mol_type = other RNA
cgccagggatcagaaaaggccc

SEQ ID NO: 19783 - RNA, 22 nt, synthetic construct
  source 1..22: mol_type = other RNA
gccagggatcagaaaaggccca

SEQ ID NO: 19784 - RNA, 22 nt, synthetic construct
  source 1..22: mol_type = other RNA
ccctcctgtggccaggaactgc

SEQ ID NO: 19785 - RNA, 22 nt, synthetic construct
  source 1..22: mol_type = other RNA
cctcctgtggccaggaactgca

SEQ ID NO: 19786 - RNA, 22 nt, synthetic construct
  source 1..22: mol_type = other RNA
acttccacagccaagggatggc

SEQ ID NO: 19787 - RNA, 22 nt, synthetic construct
  source 1..22: mol_type = other RNA
cttccacagccaagggatggcc

SEQ ID NO: 19788 - RNA, 22 nt, synthetic construct
  source 1..22: mol_type = other RNA
ccccattttgaaattcccagga

SEQ ID NO: 19789 - RNA, 22 nt, synthetic construct
  source 1..22: mol_type = other RNA
tgaaattcccaggagcttttga

SEQ ID NO: 19790 - RNA, 22 nt, synthetic construct
  source 1..22: mol_type = other RNA
gaaattcccaggagcttttgat

SEQ ID NO: 19791 - RNA, 22 nt, synthetic construct
  source 1..22: mol_type = other RNA
aaattcccaggagcttttgatg

SEQ ID NO: 19792 - RNA, 22 nt, synthetic construct
  source 1..22: mol_type = other RNA
ccaggagcttttgatgtgcagc

SEQ ID NO: 19793 - RNA, 22 nt, synthetic construct
  source 1..22: mol_type = other RNA
gatgtgcagctaggatgaaaaa

SEQ ID NO: 19794 - RNA, 22 nt, synthetic construct
  source 1..22: mol_type = other RNA
atgtgcagctaggatgaaaaag

SEQ ID NO: 19795 - RNA, 22 nt, synthetic construct
  source 1..22: mol_type = other RNA
gaaaactgaaagtcttgcatcc

SEQ ID NO: 19796 - RNA, 22 nt, synthetic construct
  source 1..22: mol_type = other RNA
aaaactgaaagtcttgcatccc

SEQ ID NO: 19797 - RNA, 22 nt, synthetic construct
  source 1..22: mol_type = other RNA
gttgctctatgtgtggccaggg

SEQ ID NO: 19798 - RNA, 22 nt, synthetic construct
  source 1..22: mol_type = other RNA
ctctatgtgtggccagggctgg

SEQ ID NO: 19799 - RNA, 22 nt, synthetic construct
  source 1..22: mol_type = other RNA
ctggggtgacagaaatggagac

SEQ ID NO: 19800 - RNA, 22 nt, synthetic construct
  source 1..22: mol_type = other RNA
tgtctgggtcactgaggagggg

SEQ ID NO: 19801 - RNA, 22 nt, synthetic construct
  source 1..22: mol_type = other RNA
ttatatttagatctgtcagaat

SEQ ID NO: 19802 - RNA, 22 nt, synthetic construct
  source 1..22: mol_type = other RNA
tatttagatctgtcagaatata

SEQ ID NO: 19803 - RNA, 22 nt, synthetic construct
  source 1..22: mol_type = other RNA
agatctgtcagaatatagcttt

SEQ ID NO: 19804 - RNA, 22 nt, synthetic construct
  source 1..22: mol_type = other RNA
gatctgtcagaatatagctttt

SEQ ID NO: 19805 - RNA, 22 nt, synthetic construct
  source 1..22: mol_type = other RNA
ctttctttctttcctttcttct

SEQ ID NO: 19806 - RNA, 22 nt, synthetic construct
  source 1..22: mol_type = other RNA
tttctttctttcctttcttctc

SEQ ID NO: 19807 - RNA, 22 nt, synthetic construct
  source 1..22: mol_type = other RNA
tttctttcctttcttctctctt

SEQ ID NO: 19808 - RNA, 22 nt, synthetic construct
  source 1..22: mol_type = other RNA
tttcctttcttctctctttctt

SEQ ID NO: 19809 - RNA, 22 nt, synthetic construct
  source 1..22: mol_type = other RNA
ctttcttctctctttctttttc

SEQ ID NO: 19810 - RNA, 22 nt, synthetic construct
  source 1..22: mol_type = other RNA
ttctctctttctttttctttct

SEQ ID NO: 19811 - RNA, 22 nt, synthetic construct
  source 1..22: mol_type = other RNA
tttttctttctttcttctttct

SEQ ID NO: 19812 - RNA, 22 nt, synthetic construct
  source 1..22: mol_type = other RNA
tctttctttcttctttctttct

SEQ ID NO: 19813 - RNA, 22 nt, synthetic construct
  source 1..22: mol_type = other RNA
ctttctttcttctttctttctt

SEQ ID NO: 19814 - RNA, 22 nt, synthetic construct
  source 1..22: mol_type = other RNA
tttctttcttctttctttcttt

SEQ ID NO: 19815 - RNA, 22 nt, synthetic construct
  source 1..22: mol_type = other RNA
tttcttctttctttctttctct

SEQ ID NO: 19816 - RNA, 22 nt, synthetic construct
  source 1..22: mol_type = other RNA
ttctttctttctttctctcttt

SEQ ID NO: 19817 - RNA, 22 nt, synthetic construct
  source 1..22: mol_type = other RNA
tttctttctctctttctttcct

SEQ ID NO: 19818 - RNA, 22 nt, synthetic construct
  source 1..22: mol_type = other RNA
tttctctctttctttcctcttt

SEQ ID NO: 19819 - RNA, 22 nt, synthetic construct
  source 1..22: mol_type = other RNA
tctctttctttcctctttcttt

SEQ ID NO: 19820 - RNA, 22 nt, synthetic construct
  source 1..22: mol_type = other RNA
tttcctctttctttcctttccc

SEQ ID NO: 19821 - RNA, 22 nt, synthetic construct
  source 1..22: mol_type = other RNA
ctctttctttcctttcccttcc

SEQ ID NO: 19822 - RNA, 22 nt, synthetic construct
  source 1..22: mol_type = other RNA
tttcctttcccttccttttctt

SEQ ID NO: 19823 - RNA, 22 nt, synthetic construct
  source 1..22: mol_type = other RNA
ctttcccttccttttctttcct

SEQ ID NO: 19824 - RNA, 22 nt, synthetic construct
  source 1..22: mol_type = other RNA
ccttccttttctttccttccct

SEQ ID NO: 19825 - RNA, 22 nt, synthetic construct
  source 1..22: mol_type = other RNA
ctttccttccctccctccctcc

SEQ ID NO: 19826 - RNA, 22 nt, synthetic construct
  source 1..22: mol_type = other RNA
tttccttccctccctccctcct

SEQ ID NO: 19827 - RNA, 22 nt, synthetic construct
  source 1..22: mol_type = other RNA
cttccctccctccctccttcct

SEQ ID NO: 19828 - RNA, 22 nt, synthetic construct
  source 1..22: mol_type = other RNA
cttctttttctttctctctgtt

SEQ ID NO: 19829 - RNA, 22 nt, synthetic construct
  source 1..22: mol_type = other RNA
ttctttttctttctctctgttt

SEQ ID NO: 19830 - RNA, 22 nt, synthetic construct
  source 1..22: mol_type = other RNA
tctttctctctgtttctttctt

SEQ ID NO: 19831 - RNA, 22 nt, synthetic construct
  source 1..22: mol_type = other RNA
ctttctctctgtttctttcttt

SEQ ID NO: 19832 - RNA, 22 nt, synthetic construct
  source 1..22: mol_type = other RNA
tttctctctgtttctttctttc

SEQ ID NO: 19833 - RNA, 22 nt, synthetic construct
  source 1..22: mol_type = other RNA
tctctgtttctttctttctttc

SEQ ID NO: 19834 - RNA, 22 nt, synthetic construct
  source 1..22: mol_type = other RNA
ctttctttctttctctctctct

SEQ ID NO: 19835 - RNA, 22 nt, synthetic construct
  source 1..22: mol_type = other RNA
tttctttctttctctctctctc

SEQ ID NO: 19836 - RNA, 22 nt, synthetic construct
  source 1..22: mol_type = other RNA
tttctttctctctctctctccc

SEQ ID NO: 19837 - RNA, 22 nt, synthetic construct
  source 1..22: mol_type = other RNA
tttctctctctctctcccttcc

SEQ ID NO: 19838 - RNA, 22 nt, synthetic construct
  source 1..22: mol_type = other RNA
tctctctctctcccttccttcc

SEQ ID NO: 19839 - RNA, 22 nt, synthetic construct
  source 1..22: mol_type = other RNA
tttctttctttccttcttttct

SEQ ID NO: 19840 - RNA, 22 nt, synthetic construct
  source 1..22: mol_type = other RNA
tttctttccttcttttctttct

SEQ ID NO: 19841 - RNA, 22 nt, synthetic construct
  source 1..22: mol_type = other RNA
tttccttcttttctttctttcc

SEQ ID NO: 19842 - RNA, 22 nt, synthetic construct
  source 1..22: mol_type = other RNA
cttcttttctttctttcctttc

SEQ ID NO: 19843 - RNA, 22 nt, synthetic construct
  source 1..22: mol_type = other RNA
ctttctttcctttctctccttt

SEQ ID NO: 19844 - RNA, 22 nt, synthetic construct
  source 1..22: mol_type = other RNA
tttctttcctttctctcctttc

SEQ ID NO: 19845 - RNA, 22 nt, synthetic construct
  source 1..22: mol_type = other RNA
tttcctttctctcctttctctt

SEQ ID NO: 19846 - RNA, 22 nt, synthetic construct
  source 1..22: mol_type = other RNA
ctttctctcctttctctttctt

SEQ ID NO: 19847 - RNA, 22 nt, synthetic construct
  source 1..22: mol_type = other RNA
tctcctttctctttctttcttt

SEQ ID NO: 19848 - RNA, 22 nt, synthetic construct
  source 1..22: mol_type = other RNA
tctttctttctttccattctct

SEQ ID NO: 19849 - RNA, 22 nt, synthetic construct
  source 1..22: mol_type = other RNA
tttctttccattctctttcttt

SEQ ID NO: 19850 - RNA, 22 nt, synthetic construct
  source 1..22: mol_type = other RNA
tttccattctctttctttctct

SEQ ID NO: 19851 - RNA, 22 nt, synthetic construct
  source 1..22: mol_type = other RNA
cattctctttctttctctttcc

SEQ ID NO: 19852 - RNA, 22 nt, synthetic construct
  source 1..22: mol_type = other RNA
tctttctttctctttccttccc

SEQ ID NO: 19853 - RNA, 22 nt, synthetic construct
  source 1..22: mol_type = other RNA
tttctctttccttccctccctt

SEQ ID NO: 19854 - RNA, 22 nt, synthetic construct
  source 1..22: mol_type = other RNA
tctttccttccctcccttcctt

SEQ ID NO: 19855 - RNA, 22 nt, synthetic construct
  source 1..22: mol_type = other RNA
cttccctcccttccttctcttc

SEQ ID NO: 19856 - RNA, 22 nt, synthetic construct
  source 1..22: mol_type = other RNA
tcctttccttttctttcctttt

SEQ ID NO: 19857 - RNA, 22 nt, synthetic construct
  source 1..22: mol_type = other RNA
cctttccttttctttccttttc

SEQ ID NO: 19858 - RNA, 22 nt, synthetic construct
  source 1..22: mol_type = other RNA
ctttccttttctttccttttct

SEQ ID NO: 19859 - RNA, 22 nt, synthetic construct
  source 1..22: mol_type = other RNA
cttttctttccttttcttttct

SEQ ID NO: 19860 - RNA, 22 nt, synthetic construct
  source 1..22: mol_type = other RNA
ctttccttttcttttctttctt

SEQ ID NO: 19861 - RNA, 22 nt, synthetic construct
  source 1..22: mol_type = other RNA
tttccttttcttttctttcttg

SEQ ID NO: 19862 - RNA, 22 nt, synthetic construct
  source 1..22: mol_type = other RNA
cttttcttttctttcttgaggc

SEQ ID NO: 19863 - RNA, 22 nt, synthetic construct
  source 1..22: mol_type = other RNA
cttttctttcttgaggcagagt

SEQ ID NO: 19864 - RNA, 22 nt, synthetic construct
  source 1..22: mol_type = other RNA
ttttctttcttgaggcagagtc

SEQ ID NO: 19865 - RNA, 22 nt, synthetic construct
  source 1..22: mol_type = other RNA
ctttcttgaggcagagtcttac

SEQ ID NO: 19866 - RNA, 22 nt, synthetic construct
  source 1..22: mol_type = other RNA
tttcttgaggcagagtcttact

SEQ ID NO: 19867 - RNA, 22 nt, synthetic construct
  source 1..22: mol_type = other RNA
ttgaggcagagtcttactctgt

SEQ ID NO: 19868 - RNA, 22 nt, synthetic construct
  source 1..22: mol_type = other RNA
agtggcacaatcacagctcacc

SEQ ID NO: 19869 - RNA, 22 nt, synthetic construct
  source 1..22: mol_type = other RNA
ttgtattttttgtagagacagg

SEQ ID NO: 19870 - RNA, 22 nt, synthetic construct
  source 1..22: mol_type = other RNA
tgtattttttgtagagacagga

SEQ ID NO: 19871 - RNA, 22 nt, synthetic construct
  source 1..22: mol_type = other RNA
gtattttttgtagagacaggat

SEQ ID NO: 19872 - RNA, 22 nt, synthetic construct
  source 1..22: mol_type = other RNA
tattttttgtagagacaggatt

SEQ ID NO: 19873 - RNA, 22 nt, synthetic construct
  source 1..22: mol_type = other RNA
tttgtagagacaggatttcacc

SEQ ID NO: 19874 - RNA, 22 nt, synthetic construct
  source 1..22: mol_type = other RNA
ttgtagagacaggatttcacca

SEQ ID NO: 19875 - RNA, 22 nt, synthetic construct
  source 1..22: mol_type = other RNA
tgtagagacaggatttcaccat

SEQ ID NO: 19876 - RNA, 22 nt, synthetic construct
  source 1..22: mol_type = other RNA
gtagagacaggatttcaccatg

SEQ ID NO: 19877 - RNA, 22 nt, synthetic construct
  source 1..22: mol_type = other RNA
tagagacaggatttcaccatgt

SEQ ID NO: 19878 - RNA, 22 nt, synthetic construct
  source 1..22: mol_type = other RNA
caccatgttgcccagtctggtc

SEQ ID NO: 19879 - RNA, 22 nt, synthetic construct
  source 1..22: mol_type = other RNA
accatgttgcccagtctggtct

SEQ ID NO: 19880 - RNA, 22 nt, synthetic construct
  source 1..22: mol_type = other RNA
cccagtctggtctcgagctcct

SEQ ID NO: 19881 - RNA, 22 nt, synthetic construct
  source 1..22: mol_type = other RNA
caggtgcgagctcccgcacctg

SEQ ID NO: 19882 - RNA, 22 nt, synthetic construct
  source 1..22: mol_type = other RNA
aaatttgcagctcaccttccat

SEQ ID NO: 19883 - RNA, 22 nt, synthetic construct
  source 1..22: mol_type = other RNA
aatttgcagctcaccttccatc

SEQ ID NO: 19884 - RNA, 22 nt, synthetic construct
  source 1..22: mol_type = other RNA
gcagctcaccttccatctcaat

SEQ ID NO: 19885 - RNA, 22 nt, synthetic construct
  source 1..22: mol_type = other RNA
cagctcaccttccatctcaatt

SEQ ID NO: 19886 - RNA, 22 nt, synthetic construct
  source 1..22: mol_type = other RNA
tctcaggccaccctcctctaca

SEQ ID NO: 19887 - RNA, 22 nt, synthetic construct
  source 1..22: mol_type = other RNA
tcatcatctccccattgtacaa

SEQ ID NO: 19888 - RNA, 22 nt, synthetic construct
  source 1..22: mol_type = other RNA
tacaaatggcaatgctgagaac

SEQ ID NO: 19889 - RNA, 22 nt, synthetic construct
  source 1..22: mol_type = other RNA
aattgtttatccaaagtcataa

SEQ ID NO: 19890 - RNA, 22 nt, synthetic construct
  source 1..22: mol_type = other RNA
tttatccaaagtcataaaggtc

SEQ ID NO: 19891 - RNA, 22 nt, synthetic construct
  source 1..22: mol_type = other RNA
atccaaagtcataaaggtcagg

SEQ ID NO: 19892 - RNA, 22 nt, synthetic construct
  source 1..22: mol_type = other RNA
tccaaagtcataaaggtcaggt

SEQ ID NO: 19893 - RNA, 22 nt, synthetic construct
  source 1..22: mol_type = other RNA
gttccttggtaggggtctagat

SEQ ID NO: 19894 - RNA, 22 nt, synthetic construct
  source 1..22: mol_type = other RNA
ttccttggtaggggtctagatc

SEQ ID NO: 19895 - RNA, 22 nt, synthetic construct
  source 1..22: mol_type = other RNA
cttggtaggggtctagatcatc

SEQ ID NO: 19896 - RNA, 22 nt, synthetic construct
  source 1..22: mol_type = other RNA
ggaaggagttgttatgcctgtg

SEQ ID NO: 19897 - RNA, 22 nt, synthetic construct
  source 1..22: mol_type = other RNA
ttatgcctgtggtatattcggt

SEQ ID NO: 19898 - RNA, 22 nt, synthetic construct
  source 1..22: mol_type = other RNA
tgcctgtggtatattcggtgct

SEQ ID NO: 19899 - RNA, 22 nt, synthetic construct
  source 1..22: mol_type = other RNA
ggtgctgtttttttttggagat

SEQ ID NO: 19900 - RNA, 22 nt, synthetic construct
  source 1..22: mol_type = other RNA
ttttttggagatggggtcttgc

SEQ ID NO: 19901 - RNA, 22 nt, synthetic construct
  source 1..22: mol_type = other RNA
tttttggagatggggtcttgct

SEQ ID NO: 19902 - RNA, 22 nt, synthetic construct
  source 1..22: mol_type = other RNA
ttttggagatggggtcttgctc

SEQ ID NO: 19903 - RNA, 22 nt, synthetic construct
  source 1..22: mol_type = other RNA
tttggagatggggtcttgctct

SEQ ID NO: 19904 - RNA, 22 nt, synthetic construct
  source 1..22: mol_type = other RNA
ttggagatggggtcttgctctg

SEQ ID NO: 19905 - RNA, 22 nt, synthetic construct
  source 1..22: mol_type = other RNA
tggagatggggtcttgctctgt

SEQ ID NO: 19906 - RNA, 22 nt, synthetic construct
  source 1..22: mol_type = other RNA
ggagatggggtcttgctctgtc

SEQ ID NO: 19907 - RNA, 22 nt, synthetic construct
  source 1..22: mol_type = other RNA
gagatggggtcttgctctgtca

SEQ ID NO: 19908 - RNA, 22 nt, synthetic construct
  source 1..22: mol_type = other RNA
aagcaattttcctgcctcagcc

SEQ ID NO: 19909 - RNA, 22 nt, synthetic construct
  source 1..22: mol_type = other RNA
tcctgcctcagcctcccgagta

SEQ ID NO: 19910 - RNA, 22 nt, synthetic construct
  source 1..22: mol_type = other RNA
cctgcctcagcctcccgagtag

SEQ ID NO: 19911 - RNA, 22 nt, synthetic construct
  source 1..22: mol_type = other RNA
ctgcctcagcctcccgagtagc

SEQ ID NO: 19912 - RNA, 22 nt, synthetic construct
  source 1..22: mol_type = other RNA
caggtgtacaccactacacctg

SEQ ID NO: 19913 - RNA, 22 nt, synthetic construct
  source 1..22: mol_type = other RNA
ttgtatttttagtagagacggg

SEQ ID NO: 19914 - RNA, 22 nt, synthetic construct
  source 1..22: mol_type = other RNA
tgtatttttagtagagacgggc

SEQ ID NO: 19915 - RNA, 22 nt, synthetic construct
  source 1..22: mol_type = other RNA
gtatttttagtagagacgggct

SEQ ID NO: 19916 - RNA, 22 nt, synthetic construct
  source 1..22: mol_type = other RNA
tatttttagtagagacgggctt

SEQ ID NO: 19917 - RNA, 22 nt, synthetic construct
  source 1..22: mol_type = other RNA
ttagtagagacgggctttaacc

SEQ ID NO: 19918 - RNA, 22 nt, synthetic construct
  source 1..22: mol_type = other RNA
tagtagagacgggctttaacca

SEQ ID NO: 19919 - RNA, 22 nt, synthetic construct
  source 1..22: mol_type = other RNA
agtagagacgggctttaaccat

SEQ ID NO: 19920 - RNA, 22 nt, synthetic construct
  source 1..22: mol_type = other RNA
gtagagacgggctttaaccatg

SEQ ID NO: 19921 - RNA, 22 nt, synthetic construct
  source 1..22: mol_type = other RNA
accatgttggccaggctggtct

SEQ ID NO: 19922 - RNA, 22 nt, synthetic construct
  source 1..22: mol_type = other RNA
gccaggctggtcttgaactcct

SEQ ID NO: 19923 - RNA, 22 nt, synthetic construct
  source 1..22: mol_type = other RNA
ctcccacctcagcctcccaaag

SEQ ID NO: 19924 - RNA, 22 nt, synthetic construct
  source 1..22: mol_type = other RNA
caggtgtaagccaccatgccca

SEQ ID NO: 19925 - RNA, 22 nt, synthetic construct
  source 1..22: mol_type = other RNA
agtgcattttatatataatctc

SEQ ID NO: 19926 - RNA, 22 nt, synthetic construct
  source 1..22: mol_type = other RNA
tatatataatctcattaatctc

SEQ ID NO: 19927 - RNA, 22 nt, synthetic construct
  source 1..22: mol_type = other RNA
atatataatctcattaatctca

SEQ ID NO: 19928 - RNA, 22 nt, synthetic construct
  source 1..22: mol_type = other RNA
tatataatctcattaatctcaa

SEQ ID NO: 19929 - RNA, 22 nt, synthetic construct
  source 1..22: mol_type = other RNA
atctcaagagctactgtggaag

SEQ ID NO: 19930 - RNA, 22 nt, synthetic construct
  source 1..22: mol_type = other RNA
tacagatgaggagacggaggcc

SEQ ID NO: 19931 - RNA, 22 nt, synthetic construct
  source 1..22: mol_type = other RNA
acagatgaggagacggaggcct

SEQ ID NO: 19932 - RNA, 22 nt, synthetic construct
  source 1..22: mol_type = other RNA
cagatgaggagacggaggcctg

SEQ ID NO: 19933 - RNA, 22 nt, synthetic construct
  source 1..22: mol_type = other RNA
agtgacttgcccgtggtccccc

SEQ ID NO: 19934 - RNA, 22 nt, synthetic construct
  source 1..22: mol_type = other RNA
tgaacagagacaaggtgctaaa

SEQ ID NO: 19935 - RNA, 22 nt, synthetic construct
  source 1..22: mol_type = other RNA
gaacagagacaaggtgctaaat

SEQ ID NO: 19936 - RNA, 22 nt, synthetic construct
  source 1..22: mol_type = other RNA
aacagagacaaggtgctaaatt

SEQ ID NO: 19937 - RNA, 22 nt, synthetic construct
  source 1..22: mol_type = other RNA
gtccagaggtaaaaatgatgct

SEQ ID NO: 19938 - RNA, 22 nt, synthetic construct
  source 1..22: mol_type = other RNA
tccagaggtaaaaatgatgctg

SEQ ID NO: 19939 - RNA, 22 nt, synthetic construct
  source 1..22: mol_type = other RNA
tggccttaaattattttcagct

SEQ ID NO: 19940 - RNA, 22 nt, synthetic construct
  source 1..22: mol_type = other RNA
ttttcagctgaaaaagccccta

SEQ ID NO: 19941 - RNA, 22 nt, synthetic construct
  source 1..22: mol_type = other RNA
tcagctgaaaaagcccctagtt

SEQ ID NO: 19942 - RNA, 22 nt, synthetic construct
  source 1..22: mol_type = other RNA
cagctgaaaaagcccctagttc

SEQ ID NO: 19943 - RNA, 22 nt, synthetic construct
  source 1..22: mol_type = other RNA
agctgaaaaagcccctagttca

SEQ ID NO: 19944 - RNA, 22 nt, synthetic construct
  source 1..22: mol_type = other RNA
aagatcggaactgcgctctggg

SEQ ID NO: 19945 - RNA, 22 nt, synthetic construct
  source 1..22: mol_type = other RNA
tgaggaaggaaggaaggaagga

SEQ ID NO: 19946 - RNA, 22 nt, synthetic construct
  source 1..22: mol_type = other RNA
ctggcattttctcaggcttcta

SEQ ID NO: 19947 - RNA, 22 nt, synthetic construct
  source 1..22: mol_type = other RNA
tggcattttctcaggcttctac

SEQ ID NO: 19948 - RNA, 22 nt, synthetic construct
  source 1..22: mol_type = other RNA
tctcaggcttctactgtgccca

SEQ ID NO: 19949 - RNA, 22 nt, synthetic construct
  source 1..22: mol_type = other RNA
ctcaggcttctactgtgcccag

SEQ ID NO: 19950 - RNA, 22 nt, synthetic construct
  source 1..22: mol_type = other RNA
tcaggcttctactgtgcccagg

SEQ ID NO: 19951 - RNA, 22 nt, synthetic construct
  source 1..22: mol_type = other RNA
ttagccactcacaaccctacag

SEQ ID NO: 19952 - RNA, 22 nt, synthetic construct
  source 1..22: mol_type = other RNA
gtacacagagtccttccccagt

SEQ ID NO: 19953 - RNA, 22 nt, synthetic construct
  source 1..22: mol_type = other RNA
tacacagagtccttccccagtt

SEQ ID NO: 19954 - RNA, 22 nt, synthetic construct
  source 1..22: mol_type = other RNA
agtccccactcacctgttcacc

SEQ ID NO: 19955 - RNA, 22 nt, synthetic construct
  source 1..22: mol_type = other RNA
acccttatctcctacactcgct

SEQ ID NO: 19956 - RNA, 22 nt, synthetic construct
  source 1..22: mol_type = other RNA
cagccacagggcctccttgctg

SEQ ID NO: 19957 - RNA, 22 nt, synthetic construct
  source 1..22: mol_type = other RNA
aacctcctaggcatgcttctgc

SEQ ID NO: 19958 - RNA, 22 nt, synthetic construct
  source 1..22: mol_type = other RNA
caccggctgtgccctctgcctg

SEQ ID NO: 19959 - RNA, 22 nt, synthetic construct
  source 1..22: mol_type = other RNA
ctcagtgaggccttttcttttc

SEQ ID NO: 19960 - RNA, 22 nt, synthetic construct
  source 1..22: mol_type = other RNA
cttttctttctttccctgtttc

SEQ ID NO: 19961 - RNA, 22 nt, synthetic construct
  source 1..22: mol_type = other RNA
ttttctttctttccctgtttct

SEQ ID NO: 19962 - RNA, 22 nt, synthetic construct
  source 1..22: mol_type = other RNA
ctttctttccctgtttctttct

SEQ ID NO: 19963 - RNA, 22 nt, synthetic construct
  source 1..22: mol_type = other RNA
tttctttccctgtttctttctt

SEQ ID NO: 19964 - RNA, 22 nt, synthetic construct
  source 1..22: mol_type = other RNA
tttccctgtttctttctttctt

SEQ ID NO: 19965 - RNA, 22 nt, synthetic construct
  source 1..22: mol_type = other RNA
cctgtttctttctttctttctt

SEQ ID NO: 19966 - RNA, 22 nt, synthetic construct
  source 1..22: mol_type = other RNA
ctttctttctttctttccctcc

SEQ ID NO: 19967 - RNA, 22 nt, synthetic construct
  source 1..22: mol_type = other RNA
tttctttctttctttccctcct

SEQ ID NO: 19968 - RNA, 22 nt, synthetic construct
  source 1..22: mol_type = other RNA
tttctttctttccctcctttct

SEQ ID NO: 19969 - RNA, 22 nt, synthetic construct
  source 1..22: mol_type = other RNA
tttctttccctcctttctttct

SEQ ID NO: 19970 - RNA, 22 nt, synthetic construct
  source 1..22: mol_type = other RNA
tttccctcctttctttctttct

SEQ ID NO: 19971 - RNA, 22 nt, synthetic construct
  source 1..22: mol_type = other RNA
cctcctttctttctttctttcc

SEQ ID NO: 19972 - RNA, 22 nt, synthetic construct
  source 1..22: mol_type = other RNA
tttctttctttccctttctttc

SEQ ID NO: 19973 - RNA, 22 nt, synthetic construct
  source 1..22: mol_type = other RNA
tttctttccctttctttctttc

SEQ ID NO: 19974 - RNA, 22 nt, synthetic construct
  source 1..22: mol_type = other RNA
tttccctttctttctttctttt

SEQ ID NO: 19975 - RNA, 22 nt, synthetic construct
  source 1..22: mol_type = other RNA
cctttctttctttctttttcct

SEQ ID NO: 19976 - RNA, 22 nt, synthetic construct
  source 1..22: mol_type = other RNA
tttctttctttttccttttttc

SEQ ID NO: 19977 - RNA, 22 nt, synthetic construct
  source 1..22: mol_type = other RNA
ttctttttctttttttgaggtg

SEQ ID NO: 19978 - RNA, 22 nt, synthetic construct
  source 1..22: mol_type = other RNA
tctttttctttttttgaggtgg

SEQ ID NO: 19979 - RNA, 22 nt, synthetic construct
  source 1..22: mol_type = other RNA
ctttttctttttttgaggtgga

SEQ ID NO: 19980 - RNA, 22 nt, synthetic construct
  source 1..22: mol_type = other RNA
tttttctttttttgaggtggag

SEQ ID NO: 19981 - RNA, 22 nt, synthetic construct
  source 1..22: mol_type = other RNA
tctttttttgaggtggagtctc

SEQ ID NO: 19982 - RNA, 22 nt, synthetic construct
  source 1..22: mol_type = other RNA
ctttttttgaggtggagtctcg

SEQ ID NO: 19983 - RNA, 22 nt, synthetic construct
  source 1..22: mol_type = other RNA
tttttttgaggtggagtctcgc

SEQ ID NO: 19984 - RNA, 22 nt, synthetic construct
  source 1..22: mol_type = other RNA
tttgaggtggagtctcgctctg

SEQ ID NO: 19985 - RNA, 22 nt, synthetic construct
  source 1..22: mol_type = other RNA
ttgaggtggagtctcgctctgt

SEQ ID NO: 19986 - RNA, 22 nt, synthetic construct
  source 1..22: mol_type = other RNA
tgaggtggagtctcgctctgtc

SEQ ID NO: 19987 - RNA, 22 nt, synthetic construct
  source 1..22: mol_type = other RNA
gaggtggagtctcgctctgtca

SEQ ID NO: 19988 - RNA, 22 nt, synthetic construct
  source 1..22: mol_type = other RNA
aggtggagtctcgctctgtcac

SEQ ID NO: 19989 - RNA, 22 nt, synthetic construct
  source 1..22: mol_type = other RNA
tcttgcctcagcctcccgagta

SEQ ID NO: 19990 - RNA, 22 nt, synthetic construct
  source 1..22: mol_type = other RNA
tttgtatttttagtagagacgg

SEQ ID NO: 19991 - RNA, 22 nt, synthetic construct
  source 1..22: mol_type = other RNA
ttgtatttttagtagagacggg

SEQ ID NO: 19992 - RNA, 22 nt, synthetic construct
  source 1..22: mol_type = other RNA
tgtatttttagtagagacgggg

SEQ ID NO: 19993 - RNA, 22 nt, synthetic construct
  source 1..22: mol_type = other RNA
gtatttttagtagagacggggt

SEQ ID NO: 19994 - RNA, 22 nt, synthetic construct
  source 1..22: mol_type = other RNA
tatttttagtagagacggggtt

SEQ ID NO: 19995 - RNA, 22 nt, synthetic construct
  source 1..22: mol_type = other RNA
ttagtagagacggggtttcacc

SEQ ID NO: 19996 - RNA, 22 nt, synthetic construct
  source 1..22: mol_type = other RNA
tagtagagacggggtttcaccg

SEQ ID NO: 19997 - RNA, 22 nt, synthetic construct
  source 1..22: mol_type = other RNA
agtagagacggggtttcaccgt

SEQ ID NO: 19998 - RNA, 22 nt, synthetic construct
  source 1..22: mol_type = other RNA
gtagagacggggtttcaccgtg

SEQ ID NO: 19999 - RNA, 22 nt, synthetic construct
  source 1..22: mol_type = other RNA
caccgtgttagccaggatggtc

SEQ ID NO: 20000 - RNA, 22 nt, synthetic construct
  source 1..22: mol_type = other RNA
accgtgttagccaggatggtct

SEQ ID NO: 20001 - RNA, 22 nt, synthetic construct
  source 1..22: mol_type = other RNA
gccaggatggtctcaatcttct

SEQ ID NO: 20002 - RNA, 22 nt, synthetic construct
  source 1..22: mol_type = other RNA
caggcgtgagccaccacacccg

SEQ ID NO: 20003 - RNA, 22 nt, synthetic construct
  source 1..22: mol_type = other RNA
ctgaccctcacagttaaaaata

SEQ ID NO: 20004 - RNA, 22 nt, synthetic construct
  source 1..22: mol_type = other RNA
tgaccctcacagttaaaaataa

SEQ ID NO: 20005 - RNA, 22 nt, synthetic construct
  source 1..22: mol_type = other RNA
aaaataaaactctggccaggcg

SEQ ID NO: 20006 - RNA, 22 nt, synthetic construct
  source 1..22: mol_type = other RNA
ggaggccgaggcaggtggatca

SEQ ID NO: 20007 - RNA, 22 nt, synthetic construct
  source 1..22: mol_type = other RNA
gagaccagcctggccaacatag

SEQ ID NO: 20008 - RNA, 22 nt, synthetic construct
  source 1..22: mol_type = other RNA
agaccagcctggccaacatagt

SEQ ID NO: 20009 - RNA, 22 nt, synthetic construct
  source 1..22: mol_type = other RNA
gctgggcatggtggcaggtgcc

SEQ ID NO: 20010 - RNA, 22 nt, synthetic construct
  source 1..22: mol_type = other RNA
gaaaccgggaggcggaggttgc

SEQ ID NO: 20011 - RNA, 22 nt, synthetic construct
  source 1..22: mol_type = other RNA
aaaccgggaggcggaggttgcg

SEQ ID NO: 20012 - RNA, 22 nt, synthetic construct
  source 1..22: mol_type = other RNA
cggtgagctgagatcacgccac

SEQ ID NO: 20013 - RNA, 22 nt, synthetic construct
  source 1..22: mol_type = other RNA
ccctcatggttaaaaaaaaaac

SEQ ID NO: 20014 - RNA, 22 nt, synthetic construct
  source 1..22: mol_type = other RNA
aaaaaaaaactccatccccctc

SEQ ID NO: 20015 - RNA, 22 nt, synthetic construct
  source 1..22: mol_type = other RNA
ccatatgattcattgtctcaga

SEQ ID NO: 20016 - RNA, 22 nt, synthetic construct
  source 1..22: mol_type = other RNA
catatgattcattgtctcagac

SEQ ID NO: 20017 - RNA, 22 nt, synthetic construct
  source 1..22: mol_type = other RNA
attgtctcagacatcagcttgc

SEQ ID NO: 20018 - RNA, 22 nt, synthetic construct
  source 1..22: mol_type = other RNA
tctcagacatcagcttgctttc

SEQ ID NO: 20019 - RNA, 22 nt, synthetic construct
  source 1..22: mol_type = other RNA
cgatttctttgattatctgtct

SEQ ID NO: 20020 - RNA, 22 nt, synthetic construct
  source 1..22: mol_type = other RNA
ctttgattatctgtctatcttc

SEQ ID NO: 20021 - RNA, 22 nt, synthetic construct
  source 1..22: mol_type = other RNA
tttgattatctgtctatcttcc

SEQ ID NO: 20022 - RNA, 22 nt, synthetic construct
  source 1..22: mol_type = other RNA
attatctgtctatcttcccccc

SEQ ID NO: 20023 - RNA, 22 nt, synthetic construct
  source 1..22: mol_type = other RNA
tctgtctatcttcccccctgga

SEQ ID NO: 20024 - RNA, 22 nt, synthetic construct
  source 1..22: mol_type = other RNA
tcgtctgtttggcccacaactt

SEQ ID NO: 20025 - RNA, 22 nt, synthetic construct
  source 1..22: mol_type = other RNA
cgtctgtttggcccacaacttt

SEQ ID NO: 20026 - RNA, 22 nt, synthetic construct
  source 1..22: mol_type = other RNA
gtctgtttggcccacaactttc

SEQ ID NO: 20027 - RNA, 22 nt, synthetic construct
  source 1..22: mol_type = other RNA
ggcccacaactttcctccctgg

SEQ ID NO: 20028 - RNA, 22 nt, synthetic construct
  source 1..22: mol_type = other RNA
gcccacaactttcctccctggg

SEQ ID NO: 20029 - RNA, 22 nt, synthetic construct
  source 1..22: mol_type = other RNA
ctccctgggcctggcacatagt

SEQ ID NO: 20030 - RNA, 22 nt, synthetic construct
  source 1..22: mol_type = other RNA
aacaacgaatgccttaatccaa

SEQ ID NO: 20031 - RNA, 22 nt, synthetic construct
  source 1..22: mol_type = other RNA
acaacgaatgccttaatccaag

SEQ ID NO: 20032 - RNA, 22 nt, synthetic construct
  source 1..22: mol_type = other RNA
gggtgaaatatttgaggagatc

SEQ ID NO: 20033 - RNA, 22 nt, synthetic construct
  source 1..22: mol_type = other RNA
gaggagatcaagacttaagggt

SEQ ID NO: 20034 - RNA, 22 nt, synthetic construct
  source 1..22: mol_type = other RNA
aggagatcaagacttaagggtg

SEQ ID NO: 20035 - RNA, 22 nt, synthetic construct
  source 1..22: mol_type = other RNA
gcagggagccaaatgccagatc

SEQ ID NO: 20036 - RNA, 22 nt, synthetic construct
  source 1..22: mol_type = other RNA
gctgaggccagtgttctcagac

SEQ ID NO: 20037 - RNA, 22 nt, synthetic construct
  source 1..22: mol_type = other RNA
ctgaggccagtgttctcagact

SEQ ID NO: 20038 - RNA, 22 nt, synthetic construct
  source 1..22: mol_type = other RNA
tcagacttcaggatttcagagg

SEQ ID NO: 20039 - RNA, 22 nt, synthetic construct
  source 1..22: mol_type = other RNA
cagaggccgagaacatttcgga

SEQ ID NO: 20040 - RNA, 22 nt, synthetic construct
  source 1..22: mol_type = other RNA
agaggccgagaacatttcggaa

SEQ ID NO: 20041 - RNA, 22 nt, synthetic construct
  source 1..22: mol_type = other RNA
cggaatgaattcgagtgaccgt

SEQ ID NO: 20042 - RNA, 22 nt, synthetic construct
  source 1..22: mol_type = other RNA
ggaatgaattcgagtgaccgtg

SEQ ID NO: 20043 - RNA, 22 nt, synthetic construct
  source 1..22: mol_type = other RNA
gagtgaccgtgcgcggttactg

SEQ ID NO: 20044 - RNA, 22 nt, synthetic construct
  source 1..22: mol_type = other RNA
ctgttttttaatgtttatcaag

SEQ ID NO: 20045 - RNA, 22 nt, synthetic construct
  source 1..22: mol_type = other RNA
tttaatgtttatcaaggatgct

SEQ ID NO: 20046 - RNA, 22 nt, synthetic construct
  source 1..22: mol_type = other RNA
ttaatgtttatcaaggatgctc

SEQ ID NO: 20047 - RNA, 22 nt, synthetic construct
  source 1..22: mol_type = other RNA
taatgtttatcaaggatgctca

SEQ ID NO: 20048 - RNA, 22 nt, synthetic construct
  source 1..22: mol_type = other RNA
aatgtttatcaaggatgctcat

SEQ ID NO: 20049 - RNA, 22 nt, synthetic construct
  source 1..22: mol_type = other RNA
atgtttatcaaggatgctcatt

SEQ ID NO: 20050 - RNA, 22 nt, synthetic construct
  source 1..22: mol_type = other RNA
atcaaggatgctcattcaaaca

SEQ ID NO: 20051 - RNA, 22 nt, synthetic construct
  source 1..22: mol_type = other RNA
tcaaggatgctcattcaaacaa

SEQ ID NO: 20052 - RNA, 22 nt, synthetic construct
  source 1..22: mol_type = other RNA
aaacaaacaaataacaacaaaa

SEQ ID NO: 20053 - RNA, 22 nt, synthetic construct
  source 1..22: mol_type = other RNA
taccaaagaatgatcattctaa

SEQ ID NO: 20054 - RNA, 22 nt, synthetic construct
  source 1..22: mol_type = other RNA
accaaagaatgatcattctaat

SEQ ID NO: 20055 - RNA, 22 nt, synthetic construct
  source 1..22: mol_type = other RNA
ccaaagaatgatcattctaata

SEQ ID NO: 20056 - RNA, 22 nt, synthetic construct
  source 1..22: mol_type = other RNA
taatattgaaaaagttcaaagg

SEQ ID NO: 20057 - RNA, 22 nt, synthetic construct
  source 1..22: mol_type = other RNA
aaaaagttcaaaggacataatt

SEQ ID NO: 20058 - RNA, 22 nt, synthetic construct
  source 1..22: mol_type = other RNA
aaaggacataattgcagaataa

SEQ ID NO: 20059 - RNA, 22 nt, synthetic construct
  source 1..22: mol_type = other RNA
cagaataaaagacagctcttta

SEQ ID NO: 20060 - RNA, 22 nt, synthetic construct
  source 1..22: mol_type = other RNA
tatggaatgcatttaaccatat

SEQ ID NO: 20061 - RNA, 22 nt, synthetic construct
  source 1..22: mol_type = other RNA
aaccatatttttaaactaaacg

SEQ ID NO: 20062 - RNA, 22 nt, synthetic construct
  source 1..22: mol_type = other RNA
accatatttttaaactaaacgg

SEQ ID NO: 20063 - RNA, 22 nt, synthetic construct
  source 1..22: mol_type = other RNA
ttaaactaaacggcccttcgtt

SEQ ID NO: 20064 - RNA, 22 nt, synthetic construct
  source 1..22: mol_type = other RNA
taaactaaacggcccttcgttg

SEQ ID NO: 20065 - RNA, 22 nt, synthetic construct
  source 1..22: mol_type = other RNA
aaactaaacggcccttcgttgt

SEQ ID NO: 20066 - RNA, 22 nt, synthetic construct
  source 1..22: mol_type = other RNA
aactaaacggcccttcgttgtc

SEQ ID NO: 20067 - RNA, 22 nt, synthetic construct
  source 1..22: mol_type = other RNA
tccttatttttctcatcccctt

SEQ ID NO: 20068 - RNA, 22 nt, synthetic construct
  source 1..22: mol_type = other RNA
ttctcatccccttgaagtctgc

SEQ ID NO: 20069 - RNA, 22 nt, synthetic construct
  source 1..22: mol_type = other RNA
tctcatccccttgaagtctgct

SEQ ID NO: 20070 - RNA, 22 nt, synthetic construct
  source 1..22: mol_type = other RNA
ctcatccccttgaagtctgctc

SEQ ID NO: 20071 - RNA, 22 nt, synthetic construct
  source 1..22: mol_type = other RNA
tcatccccttgaagtctgctct

SEQ ID NO: 20072 - RNA, 22 nt, synthetic construct
  source 1..22: mol_type = other RNA
atccaggctgtgtgaccctgtg

SEQ ID NO: 20073 - RNA, 22 nt, synthetic construct
  source 1..22: mol_type = other RNA
gatcgcctagtgcctcagtttc

SEQ ID NO: 20074 - RNA, 22 nt, synthetic construct
  source 1..22: mol_type = other RNA
atcgcctagtgcctcagtttcc

SEQ ID NO: 20075 - RNA, 22 nt, synthetic construct
  source 1..22: mol_type = other RNA
ccctatatgtaaaatggagata

SEQ ID NO: 20076 - RNA, 22 nt, synthetic construct
  source 1..22: mol_type = other RNA
cctatatgtaaaatggagataa

SEQ ID NO: 20077 - RNA, 22 nt, synthetic construct
  source 1..22: mol_type = other RNA
cttttgttattaaaatgcaaag

SEQ ID NO: 20078 - RNA, 22 nt, synthetic construct
  source 1..22: mol_type = other RNA
gttattaaaatgcaaaggcata

SEQ ID NO: 20079 - RNA, 22 nt, synthetic construct
  source 1..22: mol_type = other RNA
ttattaaaatgcaaaggcatat

SEQ ID NO: 20080 - RNA, 22 nt, synthetic construct
  source 1..22: mol_type = other RNA
ttaaaatgcaaaggcatattag

SEQ ID NO: 20081 - RNA, 22 nt, synthetic construct
  source 1..22: mol_type = other RNA
aaatgcaaaggcatattagtca

SEQ ID NO: 20082 - RNA, 22 nt, synthetic construct
  source 1..22: mol_type = other RNA
gtcaaccacctggtttaccact

SEQ ID NO: 20083 - RNA, 22 nt, synthetic construct
  source 1..22: mol_type = other RNA
accactggcagtggtcgtcagc

SEQ ID NO: 20084 - RNA, 22 nt, synthetic construct
  source 1..22: mol_type = other RNA
ccactggcagtggtcgtcagct

SEQ ID NO: 20085 - RNA, 22 nt, synthetic construct
  source 1..22: mol_type = other RNA
caggaccccttccccaggctgc

SEQ ID NO: 20086 - RNA, 22 nt, synthetic construct
  source 1..22: mol_type = other RNA
aggaccccttccccaggctgcg

SEQ ID NO: 20087 - RNA, 22 nt, synthetic construct
  source 1..22: mol_type = other RNA
ggaagagtaagaactggctccc

SEQ ID NO: 20088 - RNA, 22 nt, synthetic construct
  source 1..22: mol_type = other RNA
tttgttttttttcttttttgag

SEQ ID NO: 20089 - RNA, 22 nt, synthetic construct
  source 1..22: mol_type = other RNA
ttgttttttttcttttttgaga

SEQ ID NO: 20090 - RNA, 22 nt, synthetic construct
  source 1..22: mol_type = other RNA
tgttttttttcttttttgagac

SEQ ID NO: 20091 - RNA, 22 nt, synthetic construct
  source 1..22: mol_type = other RNA
gttttttttcttttttgagaca

SEQ ID NO: 20092 - RNA, 22 nt, synthetic construct
  source 1..22: mol_type = other RNA
ttttttttcttttttgagacag

SEQ ID NO: 20093 - RNA, 22 nt, synthetic construct
  source 1..22: mol_type = other RNA
tttttcttttttgagacagggt

SEQ ID NO: 20094 - RNA, 22 nt, synthetic construct
  source 1..22: mol_type = other RNA
ttttcttttttgagacagggtc

SEQ ID NO: 20095 - RNA, 22 nt, synthetic construct
  source 1..22: mol_type = other RNA
tttcttttttgagacagggtct

SEQ ID NO: 20096 - RNA, 22 nt, synthetic construct
  source 1..22: mol_type = other RNA
ttcttttttgagacagggtctc

SEQ ID NO: 20097 - RNA, 22 nt, synthetic construct
  source 1..22: mol_type = other RNA
tcttttttgagacagggtctcg

SEQ ID NO: 20098 - RNA, 22 nt, synthetic construct
  source 1..22: mol_type = other RNA
cttttttgagacagggtctcgc

SEQ ID NO: 20099 - RNA, 22 nt, synthetic construct
  source 1..22: mol_type = other RNA
ttttttgagacagggtctcgct

SEQ ID NO: 20100 - RNA, 22 nt, synthetic construct
  source 1..22: mol_type = other RNA
ttgagacagggtctcgctctta

SEQ ID NO: 20101 - RNA, 22 nt, synthetic construct
  source 1..22: mol_type = other RNA
tgagacagggtctcgctcttac

SEQ ID NO: 20102 - RNA, 22 nt, synthetic construct
  source 1..22: mol_type = other RNA
gagacagggtctcgctcttacc

SEQ ID NO: 20103 - RNA, 22 nt, synthetic construct
  source 1..22: mol_type = other RNA
agacagggtctcgctcttaccc

SEQ ID NO: 20104 - RNA, 22 nt, synthetic construct
  source 1..22: mol_type = other RNA
ttgtgttttttgtagagactga

SEQ ID NO: 20105 - RNA, 22 nt, synthetic construct
  source 1..22: mol_type = other RNA
tgttttttgtagagactgagtc

SEQ ID NO: 20106 - RNA, 22 nt, synthetic construct
  source 1..22: mol_type = other RNA
tttgtagagactgagtctcact

SEQ ID NO: 20107 - RNA, 22 nt, synthetic construct
  source 1..22: mol_type = other RNA
ttgtagagactgagtctcacta

SEQ ID NO: 20108 - RNA, 22 nt, synthetic construct
  source 1..22: mol_type = other RNA
tgtagagactgagtctcactat

SEQ ID NO: 20109 - RNA, 22 nt, synthetic construct
  source 1..22: mol_type = other RNA
gtagagactgagtctcactatg

SEQ ID NO: 20110 - RNA, 22 nt, synthetic construct
  source 1..22: mol_type = other RNA
tagagactgagtctcactatgt

SEQ ID NO: 20111 - RNA, 22 nt, synthetic construct
  source 1..22: mol_type = other RNA
cccaagctggtcttgaactcct

SEQ ID NO: 20112 - RNA, 22 nt, synthetic construct
  source 1..22: mol_type = other RNA
cagacatgagccactgttccca

SEQ ID NO: 20113 - RNA, 22 nt, synthetic construct
  source 1..22: mol_type = other RNA
ccagcctcaactggcctcttat

SEQ ID NO: 20114 - RNA, 22 nt, synthetic construct
  source 1..22: mol_type = other RNA
gggtcctacgtggaagggttgc

SEQ ID NO: 20115 - RNA, 22 nt, synthetic construct
  source 1..22: mol_type = other RNA
cagggacctaagaggctggggt

SEQ ID NO: 20116 - RNA, 22 nt, synthetic construct
  source 1..22: mol_type = other RNA
cctcctaggctgggccctgtct

SEQ ID NO: 20117 - RNA, 22 nt, synthetic construct
  source 1..22: mol_type = other RNA
cccaaactggtgcggatcctca

SEQ ID NO: 20118 - RNA, 22 nt, synthetic construct
  source 1..22: mol_type = other RNA
cctccctgcagcatctggagtg

SEQ ID NO: 20119 - RNA, 22 nt, synthetic construct
  source 1..22: mol_type = other RNA
ctccctgcagcatctggagtga

SEQ ID NO: 20120 - RNA, 22 nt, synthetic construct
  source 1..22: mol_type = other RNA
ctggcctcaagtagtcctcctg

SEQ ID NO: 20121 - RNA, 22 nt, synthetic construct
  source 1..22: mol_type = other RNA
tgacaaccccaaatcctgcccc

SEQ ID NO: 20122 - RNA, 22 nt, synthetic construct
  source 1..22: mol_type = other RNA
gacaaccccaaatcctgccccc

SEQ ID NO: 20123 - RNA, 22 nt, synthetic construct
  source 1..22: mol_type = other RNA
acaaccccaaatcctgccccca

SEQ ID NO: 20124 - RNA, 22 nt, synthetic construct
  source 1..22: mol_type = other RNA
tccctttttttctctcttccgc

SEQ ID NO: 20125 - RNA, 22 nt, synthetic construct
  source 1..22: mol_type = other RNA
tttctctcttccgcctactgca

SEQ ID NO: 20126 - RNA, 22 nt, synthetic construct
  source 1..22: mol_type = other RNA
ttctctcttccgcctactgcat

SEQ ID NO: 20127 - RNA, 22 nt, synthetic construct
  source 1..22: mol_type = other RNA
tctctcttccgcctactgcatc

SEQ ID NO: 20128 - RNA, 22 nt, synthetic construct
  source 1..22: mol_type = other RNA
ctctcttccgcctactgcatcc

SEQ ID NO: 20129 - RNA, 22 nt, synthetic construct
  source 1..22: mol_type = other RNA
tctcttccgcctactgcatcct

SEQ ID NO: 20130 - RNA, 22 nt, synthetic construct
  source 1..22: mol_type = other RNA
tagatcctttcgtgacctttga

SEQ ID NO: 20131 - RNA, 22 nt, synthetic construct
  source 1..22: mol_type = other RNA
gtgacctttgaaactcctttcc

SEQ ID NO: 20132 - RNA, 22 nt, synthetic construct
  source 1..22: mol_type = other RNA
aaactcctttcctcacaacctc

SEQ ID NO: 20133 - RNA, 22 nt, synthetic construct
  source 1..22: mol_type = other RNA
ctcacaacctcatttgctgctc

SEQ ID NO: 20134 - RNA, 22 nt, synthetic construct
  source 1..22: mol_type = other RNA
gctgctctcagcaattcagctg

SEQ ID NO: 20135 - RNA, 22 nt, synthetic construct
  source 1..22: mol_type = other RNA
ctgctctcagcaattcagctgg

SEQ ID NO: 20136 - RNA, 22 nt, synthetic construct
  source 1..22: mol_type = other RNA
agctggggagggattggggagc

SEQ ID NO: 20137 - RNA, 22 nt, synthetic construct
  source 1..22: mol_type = other RNA
gggagcatagtcctactttaca

SEQ ID NO: 20138 - RNA, 22 nt, synthetic construct
  source 1..22: mol_type = other RNA
cagtggaggttaaggaagttgc

SEQ ID NO: 20139 - RNA, 22 nt, synthetic construct
  source 1..22: mol_type = other RNA
aggaagttgccaagcctcaggg

SEQ ID NO: 20140 - RNA, 22 nt, synthetic construct
  source 1..22: mol_type = other RNA
ccaagcctcaggggcttagttc

SEQ ID NO: 20141 - RNA, 22 nt, synthetic construct
  source 1..22: mol_type = other RNA
ctaagaagctaaacagggattc

SEQ ID NO: 20142 - RNA, 22 nt, synthetic construct
  source 1..22: mol_type = other RNA
aagtccatcatgagttagactt

SEQ ID NO: 20143 - RNA, 22 nt, synthetic construct
  source 1..22: mol_type = other RNA
gactttgccctctggctgcctg

SEQ ID NO: 20144 - RNA, 22 nt, synthetic construct
  source 1..22: mol_type = other RNA
ccctctggctgcctggttggag

SEQ ID NO: 20145 - RNA, 22 nt, synthetic construct
  source 1..22: mol_type = other RNA
gagcccccaggtgatgaagtcc

SEQ ID NO: 20146 - RNA, 22 nt, synthetic construct
  source 1..22: mol_type = other RNA
gagctggggggtgggaagggca

SEQ ID NO: 20147 - RNA, 22 nt, synthetic construct
  source 1..22: mol_type = other RNA
cacctgcagcctggatgcgctg

SEQ ID NO: 20148 - RNA, 22 nt, synthetic construct
  source 1..22: mol_type = other RNA
tcaaaattaatttaaatttgtt

SEQ ID NO: 20149 - RNA, 22 nt, synthetic construct
  source 1..22: mol_type = other RNA
caaaattaatttaaatttgttt

SEQ ID NO: 20150 - RNA, 22 nt, synthetic construct
  source 1..22: mol_type = other RNA
aaaattaatttaaatttgtttt

SEQ ID NO: 20151 - RNA, 22 nt, synthetic construct
  source 1..22: mol_type = other RNA
atttaaatttgtttttttagac

SEQ ID NO: 20152 - RNA, 22 nt, synthetic construct
  source 1..22: mol_type = other RNA
aaatttgtttttttagacaagg

SEQ ID NO: 20153 - RNA, 22 nt, synthetic construct
  source 1..22: mol_type = other RNA
aatttgtttttttagacaaggg

SEQ ID NO: 20154 - RNA, 22 nt, synthetic construct
  source 1..22: mol_type = other RNA
gtttttttagacaagggctcgc

SEQ ID NO: 20155 - RNA, 22 nt, synthetic construct
  source 1..22: mol_type = other RNA
tttttttagacaagggctcgct

SEQ ID NO: 20156 - RNA, 22 nt, synthetic construct
  source 1..22: mol_type = other RNA
ttttagacaagggctcgctgtg

SEQ ID NO: 20157 - RNA, 22 nt, synthetic construct
  source 1..22: mol_type = other RNA
tttagacaagggctcgctgtgt

SEQ ID NO: 20158 - RNA, 22 nt, synthetic construct
  source 1..22: mol_type = other RNA
ttagacaagggctcgctgtgtc

SEQ ID NO: 20159 - RNA, 22 nt, synthetic construct
  source 1..22: mol_type = other RNA
tagacaagggctcgctgtgtca

SEQ ID NO: 20160 - RNA, 22 nt, synthetic construct
  source 1..22: mol_type = other RNA
agacaagggctcgctgtgtcac

SEQ ID NO: 20161 - RNA, 22 nt, synthetic construct
  source 1..22: mol_type = other RNA
gacaagggctcgctgtgtcacc

SEQ ID NO: 20162 - RNA, 22 nt, synthetic construct
  source 1..22: mol_type = other RNA
taggtgtgacttaccatgccca

SEQ ID NO: 20163 - RNA, 22 nt, synthetic construct
  source 1..22: mol_type = other RNA
atccattcactcattcacctat

SEQ ID NO: 20164 - RNA, 22 nt, synthetic construct
  source 1..22: mol_type = other RNA
actcattcacctattcaatcag

SEQ ID NO: 20165 - RNA, 22 nt, synthetic construct
  source 1..22: mol_type = other RNA
acctattcaatcagccattcat

SEQ ID NO: 20166 - RNA, 22 nt, synthetic construct
  source 1..22: mol_type = other RNA
aatcagccattcatccttccat

SEQ ID NO: 20167 - RNA, 22 nt, synthetic construct
  source 1..22: mol_type = other RNA
atccttccattcaatgattcat

SEQ ID NO: 20168 - RNA, 22 nt, synthetic construct
  source 1..22: mol_type = other RNA
aatgattcatccattcacttat

SEQ ID NO: 20169 - RNA, 22 nt, synthetic construct
  source 1..22: mol_type = other RNA
atccattcacttatgcagtcat

SEQ ID NO: 20170 - RNA, 22 nt, synthetic construct
  source 1..22: mol_type = other RNA
acttatgcagtcatttctttac

SEQ ID NO: 20171 - RNA, 22 nt, synthetic construct
  source 1..22: mol_type = other RNA
ctttactccctcatccaaccgc

SEQ ID NO: 20172 - RNA, 22 nt, synthetic construct
  source 1..22: mol_type = other RNA
tttactccctcatccaaccgct

SEQ ID NO: 20173 - RNA, 22 nt, synthetic construct
  source 1..22: mol_type = other RNA
ctccctcatccaaccgctcact

SEQ ID NO: 20174 - RNA, 22 nt, synthetic construct
  source 1..22: mol_type = other RNA
ctttacttacccaaccatttat

SEQ ID NO: 20175 - RNA, 22 nt, synthetic construct
  source 1..22: mol_type = other RNA
tttacttacccaaccatttatt

SEQ ID NO: 20176 - RNA, 22 nt, synthetic construct
  source 1..22: mol_type = other RNA
cttacccaaccatttattaatt

SEQ ID NO: 20177 - RNA, 22 nt, synthetic construct
  source 1..22: mol_type = other RNA
attaatttaatcaacaaatatt

SEQ ID NO: 20178 - RNA, 22 nt, synthetic construct
  source 1..22: mol_type = other RNA
ttaatttaatcaacaaatattt

SEQ ID NO: 20179 - RNA, 22 nt, synthetic construct
  source 1..22: mol_type = other RNA
atttaatcaacaaatatttaag

SEQ ID NO: 20180 - RNA, 22 nt, synthetic construct
  source 1..22: mol_type = other RNA
aatcaacaaatatttaaggagg

SEQ ID NO: 20181 - RNA, 22 nt, synthetic construct
  source 1..22: mol_type = other RNA
atcaacaaatatttaaggagga

SEQ ID NO: 20182 - RNA, 22 nt, synthetic construct
  source 1..22: mol_type = other RNA
aaggaggacctactatgtgcag

SEQ ID NO: 20183 - RNA, 22 nt, synthetic construct
  source 1..22: mol_type = other RNA
aggaggacctactatgtgcagg

SEQ ID NO: 20184 - RNA, 22 nt, synthetic construct
  source 1..22: mol_type = other RNA
taggccctggagacccagcttt

SEQ ID NO: 20185 - RNA, 22 nt, synthetic construct
  source 1..22: mol_type = other RNA
aacaaaacaaataaatcccctg

SEQ ID NO: 20186 - RNA, 22 nt, synthetic construct
  source 1..22: mol_type = other RNA
tagtgaggagacacaatgaaca

SEQ ID NO: 20187 - RNA, 22 nt, synthetic construct
  source 1..22: mol_type = other RNA
taaagtatacagtaatgaaaat

SEQ ID NO: 20188 - RNA, 22 nt, synthetic construct
  source 1..22: mol_type = other RNA
ggtgacagaaaattatactggg

SEQ ID NO: 20189 - RNA, 22 nt, synthetic construct
  source 1..22: mol_type = other RNA
gtgacagaaaattatactgggg

SEQ ID NO: 20190 - RNA, 22 nt, synthetic construct
  source 1..22: mol_type = other RNA
tactggggggtgaaataggaga

SEQ ID NO: 20191 - RNA, 22 nt, synthetic construct
  source 1..22: mol_type = other RNA
ggatttatcaataaagcattat

SEQ ID NO: 20192 - RNA, 22 nt, synthetic construct
  source 1..22: mol_type = other RNA
atcaataaagcattattatcaa

SEQ ID NO: 20193 - RNA, 22 nt, synthetic construct
  source 1..22: mol_type = other RNA
tcaataaagcattattatcaaa

SEQ ID NO: 20194 - RNA, 22 nt, synthetic construct
  source 1..22: mol_type = other RNA
ttatcaaaacagtaaaactttt

SEQ ID NO: 20195 - RNA, 22 nt, synthetic construct
  source 1..22: mol_type = other RNA
tcaaaacagtaaaactttttaa

SEQ ID NO: 20196 - RNA, 22 nt, synthetic construct
  source 1..22: mol_type = other RNA
taaaaactgttctgggctctgg

SEQ ID NO: 20197 - RNA, 22 nt, synthetic construct
  source 1..22: mol_type = other RNA
aaaaactgttctgggctctggg

SEQ ID NO: 20198 - RNA, 22 nt, synthetic construct
  source 1..22: mol_type = other RNA
aaaactgttctgggctctggga

SEQ ID NO: 20199 - RNA, 22 nt, synthetic construct
  source 1..22: mol_type = other RNA
tgggctctgggaagttggagat

SEQ ID NO: 20200 - RNA, 22 nt, synthetic construct
  source 1..22: mol_type = other RNA
gagatggataagatacaggagg

SEQ ID NO: 20201 - RNA, 22 nt, synthetic construct
  source 1..22: mol_type = other RNA
tttttctttttttcagacaagg

SEQ ID NO: 20202 - RNA, 22 nt, synthetic construct
  source 1..22: mol_type = other RNA
ttttctttttttcagacaaggt

SEQ ID NO: 20203 - RNA, 22 nt, synthetic construct
  source 1..22: mol_type = other RNA
tttctttttttcagacaaggtc

SEQ ID NO: 20204 - RNA, 22 nt, synthetic construct
  source 1..22: mol_type = other RNA
ttctttttttcagacaaggtct

SEQ ID NO: 20205 - RNA, 22 nt, synthetic construct
  source 1..22: mol_type = other RNA
tctttttttcagacaaggtctc

SEQ ID NO: 20206 - RNA, 22 nt, synthetic construct
  source 1..22: mol_type = other RNA
ctttttttcagacaaggtctcg

SEQ ID NO: 20207 - RNA, 22 nt, synthetic construct
  source 1..22: mol_type = other RNA
tttttttcagacaaggtctcgc

SEQ ID NO: 20208 - RNA, 22 nt, synthetic construct
  source 1..22: mol_type = other RNA
tttcagacaaggtctcgctctg

SEQ ID NO: 20209 - RNA, 22 nt, synthetic construct
  source 1..22: mol_type = other RNA
ttcagacaaggtctcgctctgt

SEQ ID NO: 20210 - RNA, 22 nt, synthetic construct
  source 1..22: mol_type = other RNA
tcagacaaggtctcgctctgtc

SEQ ID NO: 20211 - RNA, 22 nt, synthetic construct
  source 1..22: mol_type = other RNA
cagacaaggtctcgctctgtca

SEQ ID NO: 20212 - RNA, 22 nt, synthetic construct
  source 1..22: mol_type = other RNA
agacaaggtctcgctctgtcac

SEQ ID NO: 20213 - RNA, 22 nt, synthetic construct
  source 1..22: mol_type = other RNA
ttgtatttttttgtagagacgt

SEQ ID NO: 20214 - RNA, 22 nt, synthetic construct
  source 1..22: mol_type = other RNA
tgtatttttttgtagagacgtg

SEQ ID NO: 20215 - RNA, 22 nt, synthetic construct
  source 1..22: mol_type = other RNA
gtatttttttgtagagacgtgg

SEQ ID NO: 20216 - RNA, 22 nt, synthetic construct
  source 1..22: mol_type = other RNA
tatttttttgtagagacgtggt

SEQ ID NO: 20217 - RNA, 22 nt, synthetic construct
  source 1..22: mol_type = other RNA
ttttgtagagacgtggtttcac

SEQ ID NO: 20218 - RNA, 22 nt, synthetic construct
  source 1..22: mol_type = other RNA
tttgtagagacgtggtttcacc

SEQ ID NO: 20219 - RNA, 22 nt, synthetic construct
  source 1..22: mol_type = other RNA
ttgtagagacgtggtttcacca

SEQ ID NO: 20220 - RNA, 22 nt, synthetic construct
  source 1..22: mol_type = other RNA
tgtagagacgtggtttcaccac

SEQ ID NO: 20221 - RNA, 22 nt, synthetic construct
  source 1..22: mol_type = other RNA
gtagagacgtggtttcaccacg

SEQ ID NO: 20222 - RNA, 22 nt, synthetic construct
  source 1..22: mol_type = other RNA
tagagacgtggtttcaccacgt

SEQ ID NO: 20223 - RNA, 22 nt, synthetic construct
  source 1..22: mol_type = other RNA
caccacgttgcccaggctggtc

SEQ ID NO: 20224 - RNA, 22 nt, synthetic construct
  source 1..22: mol_type = other RNA
accacgttgcccaggctggtct

SEQ ID NO: 20225 - RNA, 22 nt, synthetic construct
  source 1..22: mol_type = other RNA
cccaggctggtcttgaacttct

SEQ ID NO: 20226 - RNA, 22 nt, synthetic construct
  source 1..22: mol_type = other RNA
caggcatgagtcactgtgcctg

SEQ ID NO: 20227 - RNA, 22 nt, synthetic construct
  source 1..22: mol_type = other RNA
aatgggattttttttttttttt

SEQ ID NO: 20228 - RNA, 22 nt, synthetic construct
  source 1..22: mol_type = other RNA
tttttttttttttttgacacgg

SEQ ID NO: 20229 - RNA, 22 nt, synthetic construct
  source 1..22: mol_type = other RNA
ttttttttttttttgacacgga

SEQ ID NO: 20230 - RNA, 22 nt, synthetic construct
  source 1..22: mol_type = other RNA
tttttttttttttgacacggag

SEQ ID NO: 20231 - RNA, 22 nt, synthetic construct
  source 1..22: mol_type = other RNA
ttttttttttttgacacggagt

SEQ ID NO: 20232 - RNA, 22 nt, synthetic construct
  source 1..22: mol_type = other RNA
tttttttttttgacacggagtc

SEQ ID NO: 20233 - RNA, 22 nt, synthetic construct
  source 1..22: mol_type = other RNA
ttttttttttgacacggagtct

SEQ ID NO: 20234 - RNA, 22 nt, synthetic construct
  source 1..22: mol_type = other RNA
tttttttttgacacggagtctc

SEQ ID NO: 20235 - RNA, 22 nt, synthetic construct
  source 1..22: mol_type = other RNA
ttttttttgacacggagtctcg

SEQ ID NO: 20236 - RNA, 22 nt, synthetic construct
  source 1..22: mol_type = other RNA
tttttttgacacggagtctcgc

SEQ ID NO: 20237 - RNA, 22 nt, synthetic construct
  source 1..22: mol_type = other RNA
ttttttgacacggagtctcgct

SEQ ID NO: 20238 - RNA, 22 nt, synthetic construct
  source 1..22: mol_type = other RNA
tttttgacacggagtctcgctc

SEQ ID NO: 20239 - RNA, 22 nt, synthetic construct
  source 1..22: mol_type = other RNA
ttttgacacggagtctcgctct

SEQ ID NO: 20240 - RNA, 22 nt, synthetic construct
  source 1..22: mol_type = other RNA
tttgacacggagtctcgctctg

SEQ ID NO: 20241 - RNA, 22 nt, synthetic construct
  source 1..22: mol_type = other RNA
ttgacacggagtctcgctctgt

SEQ ID NO: 20242 - RNA, 22 nt, synthetic construct
  source 1..22: mol_type = other RNA
tgacacggagtctcgctctgta

SEQ ID NO: 20243 - RNA, 22 nt, synthetic construct
  source 1..22: mol_type = other RNA
gacacggagtctcgctctgtag

SEQ ID NO: 20244 - RNA, 22 nt, synthetic construct
  source 1..22: mol_type = other RNA
acacggagtctcgctctgtagc

SEQ ID NO: 20245 - RNA, 22 nt, synthetic construct
  source 1..22: mol_type = other RNA
attgcaaacttcacctcctggg

SEQ ID NO: 20246 - RNA, 22 nt, synthetic construct
  source 1..22: mol_type = other RNA
ttgcaaacttcacctcctgggt

SEQ ID NO: 20247 - RNA, 22 nt, synthetic construct
  source 1..22: mol_type = other RNA
caaacttcacctcctgggttca

SEQ ID NO: 20248 - RNA, 22 nt, synthetic construct
  source 1..22: mol_type = other RNA
aagcaattctcacacctcagcc

SEQ ID NO: 20249 - RNA, 22 nt, synthetic construct
  source 1..22: mol_type = other RNA
tcacacctcagcctcccaagta

SEQ ID NO: 20250 - RNA, 22 nt, synthetic construct
  source 1..22: mol_type = other RNA
caggcatgcaccactacaccca

SEQ ID NO: 20251 - RNA, 22 nt, synthetic construct
  source 1..22: mol_type = other RNA
ttgtatttttagtagagacggg

SEQ ID NO: 20252 - RNA, 22 nt, synthetic construct
  source 1..22: mol_type = other RNA
tgtatttttagtagagacgggg

SEQ ID NO: 20253 - RNA, 22 nt, synthetic construct
  source 1..22: mol_type = other RNA
gtatttttagtagagacggggt

SEQ ID NO: 20254 - RNA, 22 nt, synthetic construct
  source 1..22: mol_type = other RNA
tatttttagtagagacggggtt

SEQ ID NO: 20255 - RNA, 22 nt, synthetic construct
  source 1..22: mol_type = other RNA
ttagtagagacggggtttcacc

SEQ ID NO: 20256 - RNA, 22 nt, synthetic construct
  source 1..22: mol_type = other RNA
tagtagagacggggtttcacca

SEQ ID NO: 20257 - RNA, 22 nt, synthetic construct
  source 1..22: mol_type = other RNA
agtagagacggggtttcaccag

SEQ ID NO: 20258 - RNA, 22 nt, synthetic construct
  source 1..22: mol_type = other RNA
gtagagacggggtttcaccagg

SEQ ID NO: 20259 - RNA, 22 nt, synthetic construct
  source 1..22: mol_type = other RNA
caccaggttggccaggctggtc

SEQ ID NO: 20260 - RNA, 22 nt, synthetic construct
  source 1..22: mol_type = other RNA
accaggttggccaggctggtct

SEQ ID NO: 20261 - RNA, 22 nt, synthetic construct
  source 1..22: mol_type = other RNA
gccaggctggtcttgaactcct

SEQ ID NO: 20262 - RNA, 22 nt, synthetic construct
  source 1..22: mol_type = other RNA
ccggcatgagccaccacgccca

SEQ ID NO: 20263 - RNA, 22 nt, synthetic construct
  source 1..22: mol_type = other RNA
aacatgattttttactgaacct

SEQ ID NO: 20264 - RNA, 22 nt, synthetic construct
  source 1..22: mol_type = other RNA
tttactgaacctagaggatatc

SEQ ID NO: 20265 - RNA, 22 nt, synthetic construct
  source 1..22: mol_type = other RNA
ttactgaacctagaggatatca

SEQ ID NO: 20266 - RNA, 22 nt, synthetic construct
  source 1..22: mol_type = other RNA
tactgaacctagaggatatcaa

SEQ ID NO: 20267 - RNA, 22 nt, synthetic construct
  source 1..22: mol_type = other RNA
actgaacctagaggatatcaaa

SEQ ID NO: 20268 - RNA, 22 nt, synthetic construct
  source 1..22: mol_type = other RNA
ctgaacctagaggatatcaaaa

SEQ ID NO: 20269 - RNA, 22 nt, synthetic construct
  source 1..22: mol_type = other RNA
accggaatttacttagcaattt

SEQ ID NO: 20270 - RNA, 22 nt, synthetic construct
  source 1..22: mol_type = other RNA
ccggaatttacttagcaatttc

SEQ ID NO: 20271 - RNA, 22 nt, synthetic construct
  source 1..22: mol_type = other RNA
acttagcaatttccttaattgt

SEQ ID NO: 20272 - RNA, 22 nt, synthetic construct
  source 1..22: mol_type = other RNA
cttagcaatttccttaattgta

SEQ ID NO: 20273 - RNA, 22 nt, synthetic construct
  source 1..22: mol_type = other RNA
ccttaattgtaggactgtggga

SEQ ID NO: 20274 - RNA, 22 nt, synthetic construct
  source 1..22: mol_type = other RNA
cttaattgtaggactgtgggac

SEQ ID NO: 20275 - RNA, 22 nt, synthetic construct
  source 1..22: mol_type = other RNA
taggactgtgggacttctccag

SEQ ID NO: 20276 - RNA, 22 nt, synthetic construct
  source 1..22: mol_type = other RNA
ctagtgtcctaggtaacactgt

SEQ ID NO: 20277 - RNA, 22 nt, synthetic construct
  source 1..22: mol_type = other RNA
tagtgtcctaggtaacactgta

SEQ ID NO: 20278 - RNA, 22 nt, synthetic construct
  source 1..22: mol_type = other RNA
cttctccttagtccttccgtcc

SEQ ID NO: 20279 - RNA, 22 nt, synthetic construct
  source 1..22: mol_type = other RNA
ttctccttagtccttccgtccc

SEQ ID NO: 20280 - RNA, 22 nt, synthetic construct
  source 1..22: mol_type = other RNA
ttacccgccaccccacttaagt

SEQ ID NO: 20281 - RNA, 22 nt, synthetic construct
  source 1..22: mol_type = other RNA
attgagcacctactatgtgcct

SEQ ID NO: 20282 - RNA, 22 nt, synthetic construct
  source 1..22: mol_type = other RNA
ttgagcacctactatgtgcctg

SEQ ID NO: 20283 - RNA, 22 nt, synthetic construct
  source 1..22: mol_type = other RNA
agcacctactatgtgcctggca

SEQ ID NO: 20284 - RNA, 22 nt, synthetic construct
  source 1..22: mol_type = other RNA
cacagccattaaacaaataatg

SEQ ID NO: 20285 - RNA, 22 nt, synthetic construct
  source 1..22: mol_type = other RNA
aacaaataatgccaacacttat

SEQ ID NO: 20286 - RNA, 22 nt, synthetic construct
  source 1..22: mol_type = other RNA
cattatagtgctgaaaagtggc

SEQ ID NO: 20287 - RNA, 22 nt, synthetic construct
  source 1..22: mol_type = other RNA
attatagtgctgaaaagtggcg

SEQ ID NO: 20288 - RNA, 22 nt, synthetic construct
  source 1..22: mol_type = other RNA
tagtgctgaaaagtggcgcaga

SEQ ID NO: 20289 - RNA, 22 nt, synthetic construct
  source 1..22: mol_type = other RNA
taaagtcatgggacaggtgggg

SEQ ID NO: 20290 - RNA, 22 nt, synthetic construct
  source 1..22: mol_type = other RNA
accgagaggtagcttaagtctg

SEQ ID NO: 20291 - RNA, 22 nt, synthetic construct
  source 1..22: mol_type = other RNA
ccgagaggtagcttaagtctgt

SEQ ID NO: 20292 - RNA, 22 nt, synthetic construct
  source 1..22: mol_type = other RNA
acagcctatgacccagaactct

SEQ ID NO: 20293 - RNA, 22 nt, synthetic construct
  source 1..22: mol_type = other RNA
ggtcctgagccctccccctcac

SEQ ID NO: 20294 - RNA, 22 nt, synthetic construct
  source 1..22: mol_type = other RNA
gtcctgagccctccccctcact

SEQ ID NO: 20295 - RNA, 22 nt, synthetic construct
  source 1..22: mol_type = other RNA
gcgggacgtggtgaaagaaact

SEQ ID NO: 20296 - RNA, 22 nt, synthetic construct
  source 1..22: mol_type = other RNA
ttcattcctagccgctgttttc

SEQ ID NO: 20297 - RNA, 22 nt, synthetic construct
  source 1..22: mol_type = other RNA
attcctagccgctgttttctta

SEQ ID NO: 20298 - RNA, 22 nt, synthetic construct
  source 1..22: mol_type = other RNA
ctagccgctgttttcttacctg

SEQ ID NO: 20299 - RNA, 22 nt, synthetic construct
  source 1..22: mol_type = other RNA
tcttacctggaaaatgggaacc

SEQ ID NO: 20300 - RNA, 22 nt, synthetic construct
  source 1..22: mol_type = other RNA
cttacctggaaaatgggaacca

SEQ ID NO: 20301 - RNA, 22 nt, synthetic construct
  source 1..22: mol_type = other RNA
ttacctggaaaatgggaaccat

SEQ ID NO: 20302 - RNA, 22 nt, synthetic construct
  source 1..22: mol_type = other RNA
tgttatgcaataaatattgctc

SEQ ID NO: 20303 - RNA, 22 nt, synthetic construct
  source 1..22: mol_type = other RNA
tgcaataaatattgctcctttt

SEQ ID NO: 20304 - RNA, 22 nt, synthetic construct
  source 1..22: mol_type = other RNA
ctccttttcccccagggatggc

SEQ ID NO: 20305 - RNA, 22 nt, synthetic construct
  source 1..22: mol_type = other RNA
cccccagggatggcgggaccag

SEQ ID NO: 20306 - RNA, 22 nt, synthetic construct
  source 1..22: mol_type = other RNA
ccccagggatggcgggaccagg

SEQ ID NO: 20307 - RNA, 22 nt, synthetic construct
  source 1..22: mol_type = other RNA
tccggaacctaggggtggtggc

SEQ ID NO: 20308 - RNA, 22 nt, synthetic construct
  source 1..22: mol_type = other RNA
ccggaacctaggggtggtggct

SEQ ID NO: 20309 - RNA, 22 nt, synthetic construct
  source 1..22: mol_type = other RNA
cggaacctaggggtggtggctt

SEQ ID NO: 20310 - RNA, 22 nt, synthetic construct
  source 1..22: mol_type = other RNA
gccggccttgtcacttacatgc

SEQ ID NO: 20311 - RNA, 22 nt, synthetic construct
  source 1..22: mol_type = other RNA
ccggccttgtcacttacatgcc

SEQ ID NO: 20312 - RNA, 22 nt, synthetic construct
  source 1..22: mol_type = other RNA
cactgccaccttctggtaggcc

SEQ ID NO: 20313 - RNA, 22 nt, synthetic construct
  source 1..22: mol_type = other RNA
actgccaccttctggtaggcct

SEQ ID NO: 20314 - RNA, 22 nt, synthetic construct
  source 1..22: mol_type = other RNA
gagtgacttccatccaggccct

SEQ ID NO: 20315 - RNA, 22 nt, synthetic construct
  source 1..22: mol_type = other RNA
agtgacttccatccaggccctg

SEQ ID NO: 20316 - RNA, 22 nt, synthetic construct
  source 1..22: mol_type = other RNA
ccagctcttcttactcgccaga

SEQ ID NO: 20317 - RNA, 22 nt, synthetic construct
  source 1..22: mol_type = other RNA
ccaggaaagatggcatttggtc

SEQ ID NO: 20318 - RNA, 22 nt, synthetic construct
  source 1..22: mol_type = other RNA
ggtcccttattatttatttatt

SEQ ID NO: 20319 - RNA, 22 nt, synthetic construct
  source 1..22: mol_type = other RNA
gtcccttattatttatttattt

SEQ ID NO: 20320 - RNA, 22 nt, synthetic construct
  source 1..22: mol_type = other RNA
atttatttttaatttttttaat

SEQ ID NO: 20321 - RNA, 22 nt, synthetic construct
  source 1..22: mol_type = other RNA
tttatttttaatttttttaatt

SEQ ID NO: 20322 - RNA, 22 nt, synthetic construct
  source 1..22: mol_type = other RNA
atttttaatttttttaatttct

SEQ ID NO: 20323 - RNA, 22 nt, synthetic construct
  source 1..22: mol_type = other RNA
tttttaatttttttaatttctg

SEQ ID NO: 20324 - RNA, 22 nt, synthetic construct
  source 1..22: mol_type = other RNA
ttaatttttttaatttctgttt

SEQ ID NO: 20325 - RNA, 22 nt, synthetic construct
  source 1..22: mol_type = other RNA
taatttttttaatttctgtttt

SEQ ID NO: 20326 - RNA, 22 nt, synthetic construct
  source 1..22: mol_type = other RNA
aatttttttaatttctgttttt

SEQ ID NO: 20327 - RNA, 22 nt, synthetic construct
  source 1..22: mol_type = other RNA
atttttttaatttctgtttttg

SEQ ID NO: 20328 - RNA, 22 nt, synthetic construct
  source 1..22: mol_type = other RNA
ttttaatttctgtttttgagat

SEQ ID NO: 20329 - RNA, 22 nt, synthetic construct
  source 1..22: mol_type = other RNA
tttaatttctgtttttgagatg

SEQ ID NO: 20330 - RNA, 22 nt, synthetic construct
  source 1..22: mol_type = other RNA
ttaatttctgtttttgagatgg

SEQ ID NO: 20331 - RNA, 22 nt, synthetic construct
  source 1..22: mol_type = other RNA
taatttctgtttttgagatgga

SEQ ID NO: 20332 - RNA, 22 nt, synthetic construct
  source 1..22: mol_type = other RNA
aatttctgtttttgagatggag

SEQ ID NO: 20333 - RNA, 22 nt, synthetic construct
  source 1..22: mol_type = other RNA
atttctgtttttgagatggagt

SEQ ID NO: 20334 - RNA, 22 nt, synthetic construct
  source 1..22: mol_type = other RNA
ctgtttttgagatggagtctcg

SEQ ID NO: 20335 - RNA, 22 nt, synthetic construct
  source 1..22: mol_type = other RNA
tgtttttgagatggagtctcgc

SEQ ID NO: 20336 - RNA, 22 nt, synthetic construct
  source 1..22: mol_type = other RNA
ttgagatggagtctcgctctgt

SEQ ID NO: 20337 - RNA, 22 nt, synthetic construct
  source 1..22: mol_type = other RNA
tgagatggagtctcgctctgtc

SEQ ID NO: 20338 - RNA, 22 nt, synthetic construct
  source 1..22: mol_type = other RNA
gagatggagtctcgctctgtca

SEQ ID NO: 20339 - RNA, 22 nt, synthetic construct
  source 1..22: mol_type = other RNA
agatggagtctcgctctgtcac

SEQ ID NO: 20340 - RNA, 22 nt, synthetic construct
  source 1..22: mol_type = other RNA
aagctattcgcctgcctcagtg

SEQ ID NO: 20341 - RNA, 22 nt, synthetic construct
  source 1..22: mol_type = other RNA
gcctgcctcagtgctccgagta

SEQ ID NO: 20342 - RNA, 22 nt, synthetic construct
  source 1..22: mol_type = other RNA
taggcgcccaccaccacgtcca

SEQ ID NO: 20343 - RNA, 22 nt, synthetic construct
  source 1..22: mol_type = other RNA
ttatatttttagtagagacagg

SEQ ID NO: 20344 - RNA, 22 nt, synthetic construct
  source 1..22: mol_type = other RNA
tatatttttagtagagacaggg

SEQ ID NO: 20345 - RNA, 22 nt, synthetic construct
  source 1..22: mol_type = other RNA
atatttttagtagagacagggt

SEQ ID NO: 20346 - RNA, 22 nt, synthetic construct
  source 1..22: mol_type = other RNA
tatttttagtagagacagggtt

SEQ ID NO: 20347 - RNA, 22 nt, synthetic construct
  source 1..22: mol_type = other RNA
ttagtagagacagggtttcgcc

SEQ ID NO: 20348 - RNA, 22 nt, synthetic construct
  source 1..22: mol_type = other RNA
tagtagagacagggtttcgcca

SEQ ID NO: 20349 - RNA, 22 nt, synthetic construct
  source 1..22: mol_type = other RNA
agtagagacagggtttcgccat

SEQ ID NO: 20350 - RNA, 22 nt, synthetic construct
  source 1..22: mol_type = other RNA
gtagagacagggtttcgccatg

SEQ ID NO: 20351 - RNA, 22 nt, synthetic construct
  source 1..22: mol_type = other RNA
cgccatgttggccaggctggtc

SEQ ID NO: 20352 - RNA, 22 nt, synthetic construct
  source 1..22: mol_type = other RNA
gccatgttggccaggctggtct

SEQ ID NO: 20353 - RNA, 22 nt, synthetic construct
  source 1..22: mol_type = other RNA
gccaggctggtctcaaactcct

SEQ ID NO: 20354 - RNA, 22 nt, synthetic construct
  source 1..22: mol_type = other RNA
caggcgtgagccaccatgcccg

SEQ ID NO: 20355 - RNA, 22 nt, synthetic construct
  source 1..22: mol_type = other RNA
atttatttatttatttatttat

SEQ ID NO: 20356 - RNA, 22 nt, synthetic construct
  source 1..22: mol_type = other RNA
tttatttatttatttatttatt

SEQ ID NO: 20357 - RNA, 22 nt, synthetic construct
  source 1..22: mol_type = other RNA
atttatttatttatttatttgg

SEQ ID NO: 20358 - RNA, 22 nt, synthetic construct
  source 1..22: mol_type = other RNA
tttatttatttatttatttgga

SEQ ID NO: 20359 - RNA, 22 nt, synthetic construct
  source 1..22: mol_type = other RNA
atttatttatttatttggagat

SEQ ID NO: 20360 - RNA, 22 nt, synthetic construct
  source 1..22: mol_type = other RNA
tttatttatttatttggagatg

SEQ ID NO: 20361 - RNA, 22 nt, synthetic construct
  source 1..22: mol_type = other RNA
atttatttatttggagatgggg

SEQ ID NO: 20362 - RNA, 22 nt, synthetic construct
  source 1..22: mol_type = other RNA
tttatttatttggagatggggt

SEQ ID NO: 20363 - RNA, 22 nt, synthetic construct
  source 1..22: mol_type = other RNA
atttatttggagatggggtctc

SEQ ID NO: 20364 - RNA, 22 nt, synthetic construct
  source 1..22: mol_type = other RNA
tttatttggagatggggtctca

SEQ ID NO: 20365 - RNA, 22 nt, synthetic construct
  source 1..22: mol_type = other RNA
atttggagatggggtctcaccc

SEQ ID NO: 20366 - RNA, 22 nt, synthetic construct
  source 1..22: mol_type = other RNA
tttggagatggggtctcaccca

SEQ ID NO: 20367 - RNA, 22 nt, synthetic construct
  source 1..22: mol_type = other RNA
ggagatggggtctcacccaggt

SEQ ID NO: 20368 - RNA, 22 nt, synthetic construct
  source 1..22: mol_type = other RNA
gagatggggtctcacccaggtt

SEQ ID NO: 20369 - RNA, 22 nt, synthetic construct
  source 1..22: mol_type = other RNA
tagtgcaggggtgcaatgatgg

SEQ ID NO: 20370 - RNA, 22 nt, synthetic construct
  source 1..22: mol_type = other RNA
atttcttcccagcatgatcact

SEQ ID NO: 20371 - RNA, 22 nt, synthetic construct
  source 1..22: mol_type = other RNA
cttcccagcatgatcactgttt

SEQ ID NO: 20372 - RNA, 22 nt, synthetic construct
  source 1..22: mol_type = other RNA
ttcccagcatgatcactgtttt

SEQ ID NO: 20373 - RNA, 22 nt, synthetic construct
  source 1..22: mol_type = other RNA
tacaatattttatttatgtagg

SEQ ID NO: 20374 - RNA, 22 nt, synthetic construct
  source 1..22: mol_type = other RNA
acaatattttatttatgtaggt

SEQ ID NO: 20375 - RNA, 22 nt, synthetic construct
  source 1..22: mol_type = other RNA
caatattttatttatgtaggtg

SEQ ID NO: 20376 - RNA, 22 nt, synthetic construct
  source 1..22: mol_type = other RNA
tatttatgtaggtgcttacttc

SEQ ID NO: 20377 - RNA, 22 nt, synthetic construct
  source 1..22: mol_type = other RNA
atttatgtaggtgcttacttct

SEQ ID NO: 20378 - RNA, 22 nt, synthetic construct
  source 1..22: mol_type = other RNA
tttatgtaggtgcttacttctt

SEQ ID NO: 20379 - RNA, 22 nt, synthetic construct
  source 1..22: mol_type = other RNA
atgtaggtgcttacttcttgct

SEQ ID NO: 20380 - RNA, 22 nt, synthetic construct
  source 1..22: mol_type = other RNA
tgtaggtgcttacttcttgcta

SEQ ID NO: 20381 - RNA, 22 nt, synthetic construct
  source 1..22: mol_type = other RNA
ataattgtgctaaaaactagag

SEQ ID NO: 20382 - RNA, 22 nt, synthetic construct
  source 1..22: mol_type = other RNA
tgctaaaaactagagatacaag

SEQ ID NO: 20383 - RNA, 22 nt, synthetic construct
  source 1..22: mol_type = other RNA
ttgcttttgagtttctttgcgt

SEQ ID NO: 20384 - RNA, 22 nt, synthetic construct
  source 1..22: mol_type = other RNA
gagtttctttgcgtagtaggaa

SEQ ID NO: 20385 - RNA, 22 nt, synthetic construct
  source 1..22: mol_type = other RNA
agtttctttgcgtagtaggaat

SEQ ID NO: 20386 - RNA, 22 nt, synthetic construct
  source 1..22: mol_type = other RNA
ctttgcgtagtaggaattaggc

SEQ ID NO: 20387 - RNA, 22 nt, synthetic construct
  source 1..22: mol_type = other RNA
tttgcgtagtaggaattaggca

SEQ ID NO: 20388 - RNA, 22 nt, synthetic construct
  source 1..22: mol_type = other RNA
cgtagtaggaattaggcacata

SEQ ID NO: 20389 - RNA, 22 nt, synthetic construct
  source 1..22: mol_type = other RNA
ggcacatacataaataaaatat

SEQ ID NO: 20390 - RNA, 22 nt, synthetic construct
  source 1..22: mol_type = other RNA
taaaacagtgattcatgctggg

SEQ ID NO: 20391 - RNA, 22 nt, synthetic construct
  source 1..22: mol_type = other RNA
atgctgggaaggaaactaacaa

SEQ ID NO: 20392 - RNA, 22 nt, synthetic construct
  source 1..22: mol_type = other RNA
ttccgtgggaagctctagggga

SEQ ID NO: 20393 - RNA, 22 nt, synthetic construct
  source 1..22: mol_type = other RNA
taagggtcagaagggccactgt

SEQ ID NO: 20394 - RNA, 22 nt, synthetic construct
  source 1..22: mol_type = other RNA
aagggtcagaagggccactgtg

SEQ ID NO: 20395 - RNA, 22 nt, synthetic construct
  source 1..22: mol_type = other RNA
agggtcagaagggccactgtgg

SEQ ID NO: 20396 - RNA, 22 nt, synthetic construct
  source 1..22: mol_type = other RNA
gcagtttttcagtgtgaatgga

SEQ ID NO: 20397 - RNA, 22 nt, synthetic construct
  source 1..22: mol_type = other RNA
cagtttttcagtgtgaatggaa

SEQ ID NO: 20398 - RNA, 22 nt, synthetic construct
  source 1..22: mol_type = other RNA
ttcagtgtgaatggaaaagtag

SEQ ID NO: 20399 - RNA, 22 nt, synthetic construct
  source 1..22: mol_type = other RNA
tcagtgtgaatggaaaagtagg

SEQ ID NO: 20400 - RNA, 22 nt, synthetic construct
  source 1..22: mol_type = other RNA
cagtgtgaatggaaaagtaggt

SEQ ID NO: 20401 - RNA, 22 nt, synthetic construct
  source 1..22: mol_type = other RNA
agtgtgaatggaaaagtaggtg

SEQ ID NO: 20402 - RNA, 22 nt, synthetic construct
  source 1..22: mol_type = other RNA
acacttttcttttttcttttct

SEQ ID NO: 20403 - RNA, 22 nt, synthetic construct
  source 1..22: mol_type = other RNA
cacttttcttttttcttttctt

SEQ ID NO: 20404 - RNA, 22 nt, synthetic construct
  source 1..22: mol_type = other RNA
ttcttttcttttctttttgaga

SEQ ID NO: 20405 - RNA, 22 nt, synthetic construct
  source 1..22: mol_type = other RNA
tcttttcttttctttttgagac

SEQ ID NO: 20406 - RNA, 22 nt, synthetic construct
  source 1..22: mol_type = other RNA
cttttcttttctttttgagacc

SEQ ID NO: 20407 - RNA, 22 nt, synthetic construct
  source 1..22: mol_type = other RNA
ttttcttttctttttgagacca

SEQ ID NO: 20408 - RNA, 22 nt, synthetic construct
  source 1..22: mol_type = other RNA
cttttctttttgagaccaagtc

SEQ ID NO: 20409 - RNA, 22 nt, synthetic construct
  source 1..22: mol_type = other RNA
ttttctttttgagaccaagtct

SEQ ID NO: 20410 - RNA, 22 nt, synthetic construct
  source 1..22: mol_type = other RNA
ctttttgagaccaagtctcact

SEQ ID NO: 20411 - RNA, 22 nt, synthetic construct
  source 1..22: mol_type = other RNA
tttttgagaccaagtctcactt

SEQ ID NO: 20412 - RNA, 22 nt, synthetic construct
  source 1..22: mol_type = other RNA
tgagaccaagtctcactttatt

SEQ ID NO: 20413 - RNA, 22 nt, synthetic construct
  source 1..22: mol_type = other RNA
gagaccaagtctcactttattg

SEQ ID NO: 20414 - RNA, 22 nt, synthetic construct
  source 1..22: mol_type = other RNA
agaccaagtctcactttattgc

SEQ ID NO: 20415 - RNA, 22 nt, synthetic construct
  source 1..22: mol_type = other RNA
ttgcccaggctaaggtgcagtg

SEQ ID NO: 20416 - RNA, 22 nt, synthetic construct
  source 1..22: mol_type = other RNA
cccaggctaaggtgcagtggca

SEQ ID NO: 20417 - RNA, 22 nt, synthetic construct
  source 1..22: mol_type = other RNA
aagtgattctcatgcctcagcc

SEQ ID NO: 20418 - RNA, 22 nt, synthetic construct
  source 1..22: mol_type = other RNA
tcatgcctcagcctcccaagta

SEQ ID NO: 20419 - RNA, 22 nt, synthetic construct
  source 1..22: mol_type = other RNA
cagatgcccgccaccacaccag

SEQ ID NO: 20420 - RNA, 22 nt, synthetic construct
  source 1..22: mol_type = other RNA
ttgtgttttcagtagagacagg

SEQ ID NO: 20421 - RNA, 22 nt, synthetic construct
  source 1..22: mol_type = other RNA
tgtgttttcagtagagacaggg

SEQ ID NO: 20422 - RNA, 22 nt, synthetic construct
  source 1..22: mol_type = other RNA
gtgttttcagtagagacagggc

SEQ ID NO: 20423 - RNA, 22 nt, synthetic construct
  source 1..22: mol_type = other RNA
tgttttcagtagagacagggct

SEQ ID NO: 20424 - RNA, 22 nt, synthetic construct
  source 1..22: mol_type = other RNA
tcagtagagacagggcttcgcc

SEQ ID NO: 20425 - RNA, 22 nt, synthetic construct
  source 1..22: mol_type = other RNA
cagtagagacagggcttcgcca

SEQ ID NO: 20426 - RNA, 22 nt, synthetic construct
  source 1..22: mol_type = other RNA
agtagagacagggcttcgccat

SEQ ID NO: 20427 - RNA, 22 nt, synthetic construct
  source 1..22: mol_type = other RNA
cgggtgtgagccaccatgccca

SEQ ID NO: 20428 - RNA, 22 nt, synthetic construct
  source 1..22: mol_type = other RNA
accctttaagaaacatcatatt

SEQ ID NO: 20429 - RNA, 22 nt, synthetic construct
  source 1..22: mol_type = other RNA
ccctttaagaaacatcatattt

SEQ ID NO: 20430 - RNA, 22 nt, synthetic construct
  source 1..22: mol_type = other RNA
agaaacatcatatttcatggaa

SEQ ID NO: 20431 - RNA, 22 nt, synthetic construct
  source 1..22: mol_type = other RNA
catggaatctaagatgccatcc

SEQ ID NO: 20432 - RNA, 22 nt, synthetic construct
  source 1..22: mol_type = other RNA
atggaatctaagatgccatcca

SEQ ID NO: 20433 - RNA, 22 nt, synthetic construct
  source 1..22: mol_type = other RNA
taagaccccaatatgaggccaa

SEQ ID NO: 20434 - RNA, 22 nt, synthetic construct
  source 1..22: mol_type = other RNA
gttataagacacatcctgatct

SEQ ID NO: 20435 - RNA, 22 nt, synthetic construct
  source 1..22: mol_type = other RNA
taagacacatcctgatctcaat

SEQ ID NO: 20436 - RNA, 22 nt, synthetic construct
  source 1..22: mol_type = other RNA
aaatggtgacatatatgtcttg

SEQ ID NO: 20437 - RNA, 22 nt, synthetic construct
  source 1..22: mol_type = other RNA
ctctccctgtggggtggaggaa

SEQ ID NO: 20438 - RNA, 22 nt, synthetic construct
  source 1..22: mol_type = other RNA
agagattgcaaaacccccatct

SEQ ID NO: 20439 - RNA, 22 nt, synthetic construct
  source 1..22: mol_type = other RNA
caaaacccccatctagtttctg

SEQ ID NO: 20440 - RNA, 22 nt, synthetic construct
  source 1..22: mol_type = other RNA
ctgcactggtaccggccgaccc

SEQ ID NO: 20441 - RNA, 22 nt, synthetic construct
  source 1..22: mol_type = other RNA
tgcactggtaccggccgacccg

SEQ ID NO: 20442 - RNA, 22 nt, synthetic construct
  source 1..22: mol_type = other RNA
atttagcctgaatccacttggc

SEQ ID NO: 20443 - RNA, 22 nt, synthetic construct
  source 1..22: mol_type = other RNA
agcctgaatccacttggcagca

SEQ ID NO: 20444 - RNA, 22 nt, synthetic construct
  source 1..22: mol_type = other RNA
gcctgaatccacttggcagcag

SEQ ID NO: 20445 - RNA, 22 nt, synthetic construct
  source 1..22: mol_type = other RNA
atttttttctttttttttcgag

SEQ ID NO: 20446 - RNA, 22 nt, synthetic construct
  source 1..22: mol_type = other RNA
tttttttctttttttttcgaga

SEQ ID NO: 20447 - RNA, 22 nt, synthetic construct
  source 1..22: mol_type = other RNA
ttttctttttttttcgagacag

SEQ ID NO: 20448 - RNA, 22 nt, synthetic construct
  source 1..22: mol_type = other RNA
tttctttttttttcgagacaga

SEQ ID NO: 20449 - RNA, 22 nt, synthetic construct
  source 1..22: mol_type = other RNA
ttctttttttttcgagacagag

SEQ ID NO: 20450 - RNA, 22 nt, synthetic construct
  source 1..22: mol_type = other RNA
tctttttttttcgagacagagt

SEQ ID NO: 20451 - RNA, 22 nt, synthetic construct
  source 1..22: mol_type = other RNA
ctttttttttcgagacagagtt

SEQ ID NO: 20452 - RNA, 22 nt, synthetic construct
  source 1..22: mol_type = other RNA
tttttttttcgagacagagttt

SEQ ID NO: 20453 - RNA, 22 nt, synthetic construct
  source 1..22: mol_type = other RNA
tttttcgagacagagtttcgct

SEQ ID NO: 20454 - RNA, 22 nt, synthetic construct
  source 1..22: mol_type = other RNA
ttttcgagacagagtttcgctc

SEQ ID NO: 20455 - RNA, 22 nt, synthetic construct
  source 1..22: mol_type = other RNA
tttcgagacagagtttcgctct

SEQ ID NO: 20456 - RNA, 22 nt, synthetic construct
  source 1..22: mol_type = other RNA
ttcgagacagagtttcgctctt

SEQ ID NO: 20457 - RNA, 22 nt, synthetic construct
  source 1..22: mol_type = other RNA
tcgagacagagtttcgctcttg

SEQ ID NO: 20458 - RNA, 22 nt, synthetic construct
  source 1..22: mol_type = other RNA
cgagacagagtttcgctcttgt

SEQ ID NO: 20459 - RNA, 22 nt, synthetic construct
  source 1..22: mol_type = other RNA
gagacagagtttcgctcttgtt

SEQ ID NO: 20460 - RNA, 22 nt, synthetic construct
  source 1..22: mol_type = other RNA
cgctcttgttgccaaggctgga

SEQ ID NO: 20461 - RNA, 22 nt, synthetic construct
  source 1..22: mol_type = other RNA
gctcttgttgccaaggctggag

SEQ ID NO: 20462 - RNA, 22 nt, synthetic construct
  source 1..22: mol_type = other RNA
ccaaggctggagtgcagtctca

SEQ ID NO: 20463 - RNA, 22 nt, synthetic construct
  source 1..22: mol_type = other RNA
actgcaactccgcctcccgagt

SEQ ID NO: 20464 - RNA, 22 nt, synthetic construct
  source 1..22: mol_type = other RNA
aagcaattctcctgcctcagcc

SEQ ID NO: 20465 - RNA, 22 nt, synthetic construct
  source 1..22: mol_type = other RNA
tcctgcctcagcctctcaagta

SEQ ID NO: 20466 - RNA, 22 nt, synthetic construct
  source 1..22: mol_type = other RNA
tgtatttttagtagagacgggg

SEQ ID NO: 20467 - RNA, 22 nt, synthetic construct
  source 1..22: mol_type = other RNA
gtatttttagtagagacggggt

SEQ ID NO: 20468 - RNA, 22 nt, synthetic construct
  source 1..22: mol_type = other RNA
tatttttagtagagacggggtt

SEQ ID NO: 20469 - RNA, 22 nt, synthetic construct
  source 1..22: mol_type = other RNA
ttagtagagacggggtttctcc

SEQ ID NO: 20470 - RNA, 22 nt, synthetic construct
  source 1..22: mol_type = other RNA
tagtagagacggggtttctcca

SEQ ID NO: 20471 - RNA, 22 nt, synthetic construct
  source 1..22: mol_type = other RNA
agtagagacggggtttctccat

SEQ ID NO: 20472 - RNA, 22 nt, synthetic construct
  source 1..22: mol_type = other RNA
gtagagacggggtttctccatg

SEQ ID NO: 20473 - RNA, 22 nt, synthetic construct
  source 1..22: mol_type = other RNA
ctccatgttggtcaggctggtc

SEQ ID NO: 20474 - RNA, 22 nt, synthetic construct
  source 1..22: mol_type = other RNA
tccatgttggtcaggctggtct

SEQ ID NO: 20475 - RNA, 22 nt, synthetic construct
  source 1..22: mol_type = other RNA
gtcaggctggtctcaaactccc

SEQ ID NO: 20476 - RNA, 22 nt, synthetic construct
  source 1..22: mol_type = other RNA
ggattacaggcgtgagccactg

SEQ ID NO: 20477 - RNA, 22 nt, synthetic construct
  source 1..22: mol_type = other RNA
caggcgtgagccactgcacctg

SEQ ID NO: 20478 - RNA, 22 nt, synthetic construct
  source 1..22: mol_type = other RNA
atatgcagccctgcaagggagt

SEQ ID NO: 20479 - RNA, 22 nt, synthetic construct
  source 1..22: mol_type = other RNA
tatgcagccctgcaagggagtt

SEQ ID NO: 20480 - RNA, 22 nt, synthetic construct
  source 1..22: mol_type = other RNA
tgaggctgaatcatggcaaagt

SEQ ID NO: 20481 - RNA, 22 nt, synthetic construct
  source 1..22: mol_type = other RNA
aaaggctgcttggtgtcgagta

SEQ ID NO: 20482 - RNA, 22 nt, synthetic construct
  source 1..22: mol_type = other RNA
gcatcagtgacactcatcatgc

SEQ ID NO: 20483 - RNA, 22 nt, synthetic construct
  source 1..22: mol_type = other RNA
tcactgctactaatgctggttg

SEQ ID NO: 20484 - RNA, 22 nt, synthetic construct
  source 1..22: mol_type = other RNA
cactgctactaatgctggttgt

SEQ ID NO: 20485 - RNA, 22 nt, synthetic construct
  source 1..22: mol_type = other RNA
actgctactaatgctggttgtg

SEQ ID NO: 20486 - RNA, 22 nt, synthetic construct
  source 1..22: mol_type = other RNA
tgaatatgctgcagaaactgga

SEQ ID NO: 20487 - RNA, 22 nt, synthetic construct
  source 1..22: mol_type = other RNA
tctcttcctgcccccagtgctg

SEQ ID NO: 20488 - RNA, 22 nt, synthetic construct
  source 1..22: mol_type = other RNA
ctcttcctgcccccagtgctgg

SEQ ID NO: 20489 - RNA, 22 nt, synthetic construct
  source 1..22: mol_type = other RNA
tcttcctgcccccagtgctggt

SEQ ID NO: 20490 - RNA, 22 nt, synthetic construct
  source 1..22: mol_type = other RNA
actcatgcgaccctcaccaatg

SEQ ID NO: 20491 - RNA, 22 nt, synthetic construct
  source 1..22: mol_type = other RNA
ctgtgatgtagtcagaaccata

SEQ ID NO: 20492 - RNA, 22 nt, synthetic construct
  source 1..22: mol_type = other RNA
agttcattctaggcaccaaggc

SEQ ID NO: 20493 - RNA, 22 nt, synthetic construct
  source 1..22: mol_type = other RNA
gttcattctaggcaccaaggca

SEQ ID NO: 20494 - RNA, 22 nt, synthetic construct
  source 1..22: mol_type = other RNA
attctaggcaccaaggcatgtt

SEQ ID NO: 20495 - RNA, 22 nt, synthetic construct
  source 1..22: mol_type = other RNA
taggcaccaaggcatgttctaa

SEQ ID NO: 20496 - RNA, 22 nt, synthetic construct
  source 1..22: mol_type = other RNA
taaatgttatatcagcattgat

SEQ ID NO: 20497 - RNA, 22 nt, synthetic construct
  source 1..22: mol_type = other RNA
tatcagcattgattcatttact

SEQ ID NO: 20498 - RNA, 22 nt, synthetic construct
  source 1..22: mol_type = other RNA
attcatttactcctccccacaa

SEQ ID NO: 20499 - RNA, 22 nt, synthetic construct
  source 1..22: mol_type = other RNA
atttactcctccccacaatgac

SEQ ID NO: 20500 - RNA, 22 nt, synthetic construct
  source 1..22: mol_type = other RNA
actcctccccacaatgactcta

SEQ ID NO: 20501 - RNA, 22 nt, synthetic construct
  source 1..22: mol_type = other RNA
ctcctccccacaatgactctat

SEQ ID NO: 20502 - RNA, 22 nt, synthetic construct
  source 1..22: mol_type = other RNA
tacagatgggcaaactgagtct

SEQ ID NO: 20503 - RNA, 22 nt, synthetic construct
  source 1..22: mol_type = other RNA
acagatgggcaaactgagtctc

SEQ ID NO: 20504 - RNA, 22 nt, synthetic construct
  source 1..22: mol_type = other RNA
cagatgggcaaactgagtctca

SEQ ID NO: 20505 - RNA, 22 nt, synthetic construct
  source 1..22: mol_type = other RNA
agtagcttgcccaaggtcacat

SEQ ID NO: 20506 - RNA, 22 nt, synthetic construct
  source 1..22: mol_type = other RNA
gaacttgggaagttgttctgac

SEQ ID NO: 20507 - RNA, 22 nt, synthetic construct
  source 1..22: mol_type = other RNA
aacttgggaagttgttctgaca

SEQ ID NO: 20508 - RNA, 22 nt, synthetic construct
  source 1..22: mol_type = other RNA
ttctgacagtttccacacagta

SEQ ID NO: 20509 - RNA, 22 nt, synthetic construct
  source 1..22: mol_type = other RNA
tgacagtttccacacagtaagg

SEQ ID NO: 20510 - RNA, 22 nt, synthetic construct
  source 1..22: mol_type = other RNA
ccacacagtaaggcaagaaatg

SEQ ID NO: 20511 - RNA, 22 nt, synthetic construct
  source 1..22: mol_type = other RNA
cacacagtaaggcaagaaatga

SEQ ID NO: 20512 - RNA, 22 nt, synthetic construct
  source 1..22: mol_type = other RNA
agtcctgctgttttcctgggct

SEQ ID NO: 20513 - RNA, 22 nt, synthetic construct
  source 1..22: mol_type = other RNA
gtcctgctgttttcctgggctc

SEQ ID NO: 20514 - RNA, 22 nt, synthetic construct
  source 1..22: mol_type = other RNA
tcctgggctcactgtttgacca

SEQ ID NO: 20515 - RNA, 22 nt, synthetic construct
  source 1..22: mol_type = other RNA
cctgggctcactgtttgaccac

SEQ ID NO: 20516 - RNA, 22 nt, synthetic construct
  source 1..22: mol_type = other RNA
ctgggctcactgtttgaccaca

SEQ ID NO: 20517 - RNA, 22 nt, synthetic construct
  source 1..22: mol_type = other RNA
gaccacagagaagtggtctcaa

SEQ ID NO: 20518 - RNA, 22 nt, synthetic construct
  source 1..22: mol_type = other RNA
accacagagaagtggtctcaac

SEQ ID NO: 20519 - RNA, 22 nt, synthetic construct
  source 1..22: mol_type = other RNA
gcctgtctttaaaatggggcag

SEQ ID NO: 20520 - RNA, 22 nt, synthetic construct
  source 1..22: mol_type = other RNA
cctgtctttaaaatggggcagt

SEQ ID NO: 20521 - RNA, 22 nt, synthetic construct
  source 1..22: mol_type = other RNA
aaatggggcagtaatcccagta

SEQ ID NO: 20522 - RNA, 22 nt, synthetic construct
  source 1..22: mol_type = other RNA
agcaagtcacttattcattcct

SEQ ID NO: 20523 - RNA, 22 nt, synthetic construct
  source 1..22: mol_type = other RNA
attcctagcctctattttcata

SEQ ID NO: 20524 - RNA, 22 nt, synthetic construct
  source 1..22: mol_type = other RNA
ctagcctctattttcatatcta

SEQ ID NO: 20525 - RNA, 22 nt, synthetic construct
  source 1..22: mol_type = other RNA
tcatatctagaaaatgggaacc

SEQ ID NO: 20526 - RNA, 22 nt, synthetic construct
  source 1..22: mol_type = other RNA
catatctagaaaatgggaacca

SEQ ID NO: 20527 - RNA, 22 nt, synthetic construct
  source 1..22: mol_type = other RNA
atatctagaaaatgggaaccat

SEQ ID NO: 20528 - RNA, 22 nt, synthetic construct
  source 1..22: mol_type = other RNA
tgcaataaatattgattccttc

SEQ ID NO: 20529 - RNA, 22 nt, synthetic construct
  source 1..22: mol_type = other RNA
attccttcccccagggatagtg

SEQ ID NO: 20530 - RNA, 22 nt, synthetic construct
  source 1..22: mol_type = other RNA
cttcccccagggatagtgggac

SEQ ID NO: 20531 - RNA, 22 nt, synthetic construct
  source 1..22: mol_type = other RNA
tctggaatctagggatggtggc

SEQ ID NO: 20532 - RNA, 22 nt, synthetic construct
  source 1..22: mol_type = other RNA
ctggaatctagggatggtggct

SEQ ID NO: 20533 - RNA, 22 nt, synthetic construct
  source 1..22: mol_type = other RNA
tggaatctagggatggtggctt

SEQ ID NO: 20534 - RNA, 22 nt, synthetic construct
  source 1..22: mol_type = other RNA
ccgacagcttgtacaataactg

SEQ ID NO: 20535 - RNA, 22 nt, synthetic construct
  source 1..22: mol_type = other RNA
cgacagcttgtacaataactgc

SEQ ID NO: 20536 - RNA, 22 nt, synthetic construct
  source 1..22: mol_type = other RNA
ctcttgccagcgtccagtacaa

SEQ ID NO: 20537 - RNA, 22 nt, synthetic construct
  source 1..22: mol_type = other RNA
tcttgccagcgtccagtacaac

SEQ ID NO: 20538 - RNA, 22 nt, synthetic construct
  source 1..22: mol_type = other RNA
acggctgccggggcccagcagc

SEQ ID NO: 20539 - RNA, 22 nt, synthetic construct
  source 1..22: mol_type = other RNA
tgtgaggcttaaactaatcaag

SEQ ID NO: 20540 - RNA, 22 nt, synthetic construct
  source 1..22: mol_type = other RNA
gtgaggcttaaactaatcaagc

SEQ ID NO: 20541 - RNA, 22 nt, synthetic construct
  source 1..22: mol_type = other RNA
tgaggcttaaactaatcaagcc

SEQ ID NO: 20542 - RNA, 22 nt, synthetic construct
  source 1..22: mol_type = other RNA
ggctgaaccatatgaaattgct

SEQ ID NO: 20543 - RNA, 22 nt, synthetic construct
  source 1..22: mol_type = other RNA
ctgacatccacccatttttgac

SEQ ID NO: 20544 - RNA, 22 nt, synthetic construct
  source 1..22: mol_type = other RNA
ttgacctgtaaaattggcaatt

SEQ ID NO: 20545 - RNA, 22 nt, synthetic construct
  source 1..22: mol_type = other RNA
tgacctgtaaaattggcaattt

SEQ ID NO: 20546 - RNA, 22 nt, synthetic construct
  source 1..22: mol_type = other RNA
gacctgtaaaattggcaatttc

SEQ ID NO: 20547 - RNA, 22 nt, synthetic construct
  source 1..22: mol_type = other RNA
acctgtaaaattggcaatttca

SEQ ID NO: 20548 - RNA, 22 nt, synthetic construct
  source 1..22: mol_type = other RNA
gcaatttcatatggttcaggtt

SEQ ID NO: 20549 - RNA, 22 nt, synthetic construct
  source 1..22: mol_type = other RNA
catatggttcaggtttatcttt

SEQ ID NO: 20550 - RNA, 22 nt, synthetic construct
  source 1..22: mol_type = other RNA
atatggttcaggtttatctttt

SEQ ID NO: 20551 - RNA, 22 nt, synthetic construct
  source 1..22: mol_type = other RNA
aggtttatcttttattaagtca

SEQ ID NO: 20552 - RNA, 22 nt, synthetic construct
  source 1..22: mol_type = other RNA
atcttttattaagtcaccatga

SEQ ID NO: 20553 - RNA, 22 nt, synthetic construct
  source 1..22: mol_type = other RNA
tcttttattaagtcaccatgat

SEQ ID NO: 20554 - RNA, 22 nt, synthetic construct
  source 1..22: mol_type = other RNA
attaagtcaccatgatgtccaa

SEQ ID NO: 20555 - RNA, 22 nt, synthetic construct
  source 1..22: mol_type = other RNA
ttaagtcaccatgatgtccaat

SEQ ID NO: 20556 - RNA, 22 nt, synthetic construct
  source 1..22: mol_type = other RNA
agtcaccatgatgtccaatact

SEQ ID NO: 20557 - RNA, 22 nt, synthetic construct
  source 1..22: mol_type = other RNA
ctttatattctttcaaagcact

SEQ ID NO: 20558 - RNA, 22 nt, synthetic construct
  source 1..22: mol_type = other RNA
tattctttcaaagcacttttat

SEQ ID NO: 20559 - RNA, 22 nt, synthetic construct
  source 1..22: mol_type = other RNA
tttcaaagcacttttatctcca

SEQ ID NO: 20560 - RNA, 22 nt, synthetic construct
  source 1..22: mol_type = other RNA
aaagcacttttatctccacaat

SEQ ID NO: 20561 - RNA, 22 nt, synthetic construct
  source 1..22: mol_type = other RNA
atctccacaatcactcacctct

SEQ ID NO: 20562 - RNA, 22 nt, synthetic construct
  source 1..22: mol_type = other RNA
tctccacaatcactcacctctt

SEQ ID NO: 20563 - RNA, 22 nt, synthetic construct
  source 1..22: mol_type = other RNA
tacagatgaggaaaataaagca

SEQ ID NO: 20564 - RNA, 22 nt, synthetic construct
  source 1..22: mol_type = other RNA
acagatgaggaaaataaagcac

SEQ ID NO: 20565 - RNA, 22 nt, synthetic construct
  source 1..22: mol_type = other RNA
cagatgaggaaaataaagcaca

SEQ ID NO: 20566 - RNA, 22 nt, synthetic construct
  source 1..22: mol_type = other RNA
actaacctttctggggtcacac

SEQ ID NO: 20567 - RNA, 22 nt, synthetic construct
  source 1..22: mol_type = other RNA
tggggtcacacagcaagtcagc

SEQ ID NO: 20568 - RNA, 22 nt, synthetic construct
  source 1..22: mol_type = other RNA
ccccatgacccacaccggtcgg

SEQ ID NO: 20569 - RNA, 22 nt, synthetic construct
  source 1..22: mol_type = other RNA
cccatgacccacaccggtcggt

SEQ ID NO: 20570 - RNA, 22 nt, synthetic construct
  source 1..22: mol_type = other RNA
taggctgggtggaaggagggat

SEQ ID NO: 20571 - RNA, 22 nt, synthetic construct
  source 1..22: mol_type = other RNA
gggggcagctgtcactggggcc

SEQ ID NO: 20572 - RNA, 22 nt, synthetic construct
  source 1..22: mol_type = other RNA
ggggcagctgtcactggggccc

SEQ ID NO: 20573 - RNA, 22 nt, synthetic construct
  source 1..22: mol_type = other RNA
agtgtccaggaacacctgcaac

SEQ ID NO: 20574 - RNA, 22 nt, synthetic construct
  source 1..22: mol_type = other RNA
acggatcagcctgagatgatcc

SEQ ID NO: 20575 - RNA, 22 nt, synthetic construct
  source 1..22: mol_type = other RNA
ggggcagtgtccttgtgaaggt

SEQ ID NO: 20576 - RNA, 22 nt, synthetic construct
  source 1..22: mol_type = other RNA
aaaaaatgtgggcgggacacag

SEQ ID NO: 20577 - RNA, 22 nt, synthetic construct
  source 1..22: mol_type = other RNA
cgagcttggtccctgtggtcag

SEQ ID NO: 20578 - RNA, 22 nt, synthetic construct
  source 1..22: mol_type = other RNA
gccatccacatcccacagcctc

SEQ ID NO: 20579 - RNA, 22 nt, synthetic construct
  source 1..22: mol_type = other RNA
gggactccaagccttcccagct

SEQ ID NO: 20580 - RNA, 22 nt, synthetic construct
  source 1..22: mol_type = other RNA
cggcttggtggctgccctgatg

SEQ ID NO: 20581 - RNA, 22 nt, synthetic construct
  source 1..22: mol_type = other RNA
ggcttggtggctgccctgatgc

SEQ ID NO: 20582 - RNA, 22 nt, synthetic construct
  source 1..22: mol_type = other RNA
gtctcagatgaacttgcttgac

SEQ ID NO: 20583 - RNA, 22 nt, synthetic construct
  source 1..22: mol_type = other RNA
tctcagatgaacttgcttgaca

SEQ ID NO: 20584 - RNA, 22 nt, synthetic construct
  source 1..22: mol_type = other RNA
cactgcccctcccatcccccca

SEQ ID NO: 20585 - RNA, 22 nt, synthetic construct
  source 1..22: mol_type = other RNA
agggttggcccctgcccggctg

SEQ ID NO: 20586 - RNA, 22 nt, synthetic construct
  source 1..22: mol_type = other RNA
gcccctgcccggctgcggaatg

SEQ ID NO: 20587 - RNA, 22 nt, synthetic construct
  source 1..22: mol_type = other RNA
gcgcccagttgggtggatgcct

SEQ ID NO: 20588 - RNA, 22 nt, synthetic construct
  source 1..22: mol_type = other RNA
ggtggatgcctggtggcagctg

SEQ ID NO: 20589 - RNA, 22 nt, synthetic construct
  source 1..22: mol_type = other RNA
cggacagccacggccaggccag

SEQ ID NO: 20590 - RNA, 22 nt, synthetic construct
  source 1..22: mol_type = other RNA
tgcctgcccaggcccctgccac

SEQ ID NO: 20591 - RNA, 22 nt, synthetic construct
  source 1..22: mol_type = other RNA
tttttatttttagacagagtct

SEQ ID NO: 20592 - RNA, 22 nt, synthetic construct
  source 1..22: mol_type = other RNA
ttttatttttagacagagtctc

SEQ ID NO: 20593 - RNA, 22 nt, synthetic construct
  source 1..22: mol_type = other RNA
tttatttttagacagagtctca

SEQ ID NO: 20594 - RNA, 22 nt, synthetic construct
  source 1..22: mol_type = other RNA
ttatttttagacagagtctcac

SEQ ID NO: 20595 - RNA, 22 nt, synthetic construct
  source 1..22: mol_type = other RNA
tatttttagacagagtctcact

SEQ ID NO: 20596 - RNA, 22 nt, synthetic construct
  source 1..22: mol_type = other RNA
atttttagacagagtctcactg

SEQ ID NO: 20597 - RNA, 22 nt, synthetic construct
  source 1..22: mol_type = other RNA
tttttagacagagtctcactgt

SEQ ID NO: 20598 - RNA, 22 nt, synthetic construct
  source 1..22: mol_type = other RNA
ttagacagagtctcactgttgc

SEQ ID NO: 20599 - RNA, 22 nt, synthetic construct
  source 1..22: mol_type = other RNA
tagacagagtctcactgttgcc

SEQ ID NO: 20600 - RNA, 22 nt, synthetic construct
  source 1..22: mol_type = other RNA
agacagagtctcactgttgccc

SEQ ID NO: 20601 - RNA, 22 nt, synthetic construct
  source 1..22: mol_type = other RNA
gacagagtctcactgttgccca

SEQ ID NO: 20602 - RNA, 22 nt, synthetic construct
  source 1..22: mol_type = other RNA
cccaggctggcgtgcagtggtg

SEQ ID NO: 20603 - RNA, 22 nt, synthetic construct
  source 1..22: mol_type = other RNA
actgcaacctccgcctcttggg

SEQ ID NO: 20604 - RNA, 22 nt, synthetic construct
  source 1..22: mol_type = other RNA
aagcgattcttctgcttcagcc

SEQ ID NO: 20605 - RNA, 22 nt, synthetic construct
  source 1..22: mol_type = other RNA
ttctgcttcagcctcccgagta

SEQ ID NO: 20606 - RNA, 22 nt, synthetic construct
  source 1..22: mol_type = other RNA
ttcatttttagtagagacaggg

SEQ ID NO: 20607 - RNA, 22 nt, synthetic construct
  source 1..22: mol_type = other RNA
tcatttttagtagagacagggt

SEQ ID NO: 20608 - RNA, 22 nt, synthetic construct
  source 1..22: mol_type = other RNA
catttttagtagagacagggtt

SEQ ID NO: 20609 - RNA, 22 nt, synthetic construct
  source 1..22: mol_type = other RNA
atttttagtagagacagggttt

SEQ ID NO: 20610 - RNA, 22 nt, synthetic construct
  source 1..22: mol_type = other RNA
ttagtagagacagggttttgcc

SEQ ID NO: 20611 - RNA, 22 nt, synthetic construct
  source 1..22: mol_type = other RNA
tagtagagacagggttttgcca

SEQ ID NO: 20612 - RNA, 22 nt, synthetic construct
  source 1..22: mol_type = other RNA
agtagagacagggttttgccat

SEQ ID NO: 20613 - RNA, 22 nt, synthetic construct
  source 1..22: mol_type = other RNA
gtagagacagggttttgccatg

SEQ ID NO: 20614 - RNA, 22 nt, synthetic construct
  source 1..22: mol_type = other RNA
tgccatgttggccaggctggtc

SEQ ID NO: 20615 - RNA, 22 nt, synthetic construct
  source 1..22: mol_type = other RNA
gccatgttggccaggctggtct

SEQ ID NO: 20616 - RNA, 22 nt, synthetic construct
  source 1..22: mol_type = other RNA
ccatgttggccaggctggtctc

SEQ ID NO: 20617 - RNA, 22 nt, synthetic construct
  source 1..22: mol_type = other RNA
gccaggctggtctcaaactctt

SEQ ID NO: 20618 - RNA, 22 nt, synthetic construct
  source 1..22: mol_type = other RNA
caagcgtgagccactgcaccgg

SEQ ID NO: 20619 - RNA, 22 nt, synthetic construct
  source 1..22: mol_type = other RNA
cccagattgcaacaggctgggc

SEQ ID NO: 20620 - RNA, 22 nt, synthetic construct
  source 1..22: mol_type = other RNA
caacaggctgggcttcagtggc

SEQ ID NO: 20621 - RNA, 22 nt, synthetic construct
  source 1..22: mol_type = other RNA
gtctatgggactcaatgcactg

SEQ ID NO: 20622 - RNA, 22 nt, synthetic construct
  source 1..22: mol_type = other RNA
tctatgggactcaatgcactga

SEQ ID NO: 20623 - RNA, 22 nt, synthetic construct
  source 1..22: mol_type = other RNA
ttggccaaagccaaagctaggc

SEQ ID NO: 20624 - RNA, 22 nt, synthetic construct
  source 1..22: mol_type = other RNA
gccaaagccaaagctaggcctg

SEQ ID NO: 20625 - RNA, 22 nt, synthetic construct
  source 1..22: mol_type = other RNA
cctgtgtcttttttcactacat

SEQ ID NO: 20626 - RNA, 22 nt, synthetic construct
  source 1..22: mol_type = other RNA
ctgtgtcttttttcactacatt

SEQ ID NO: 20627 - RNA, 22 nt, synthetic construct
  source 1..22: mol_type = other RNA
ttcactacattataaatgtctc

SEQ ID NO: 20628 - RNA, 22 nt, synthetic construct
  source 1..22: mol_type = other RNA
tcactacattataaatgtctct

SEQ ID NO: 20629 - RNA, 22 nt, synthetic construct
  source 1..22: mol_type = other RNA
cactacattataaatgtctctt

SEQ ID NO: 20630 - RNA, 22 nt, synthetic construct
  source 1..22: mol_type = other RNA
actacattataaatgtctcttt

SEQ ID NO: 20631 - RNA, 22 nt, synthetic construct
  source 1..22: mol_type = other RNA
taaatgtctctttaatgtcaca

SEQ ID NO: 20632 - RNA, 22 nt, synthetic construct
  source 1..22: mol_type = other RNA
atgtcacaggcaggtccagggt

SEQ ID NO: 20633 - RNA, 22 nt, synthetic construct
  source 1..22: mol_type = other RNA
gagttcataccctgttaccatt

SEQ ID NO: 20634 - RNA, 22 nt, synthetic construct
  source 1..22: mol_type = other RNA
agttcataccctgttaccattt

SEQ ID NO: 20635 - RNA, 22 nt, synthetic construct
  source 1..22: mol_type = other RNA
ataccctgttaccattttgggg

SEQ ID NO: 20636 - RNA, 22 nt, synthetic construct
  source 1..22: mol_type = other RNA
ccattttggggtacccactgct

SEQ ID NO: 20637 - RNA, 22 nt, synthetic construct
  source 1..22: mol_type = other RNA
tggggtacccactgctctggtt

SEQ ID NO: 20638 - RNA, 22 nt, synthetic construct
  source 1..22: mol_type = other RNA
ggggtacccactgctctggtta

SEQ ID NO: 20639 - RNA, 22 nt, synthetic construct
  source 1..22: mol_type = other RNA
gggtacccactgctctggttat

SEQ ID NO: 20640 - RNA, 22 nt, synthetic construct
  source 1..22: mol_type = other RNA
tctaatatgtaacaagccaccc

SEQ ID NO: 20641 - RNA, 22 nt, synthetic construct
  source 1..22: mol_type = other RNA
attctgctcacatatctgtcat

SEQ ID NO: 20642 - RNA, 22 nt, synthetic construct
  source 1..22: mol_type = other RNA
ttctgctcacatatctgtcatt

SEQ ID NO: 20643 - RNA, 22 nt, synthetic construct
  source 1..22: mol_type = other RNA
tgctcacatatctgtcatttga

SEQ ID NO: 20644 - RNA, 22 nt, synthetic construct
  source 1..22: mol_type = other RNA
gagcagggctcagcggggacag

SEQ ID NO: 20645 - RNA, 22 nt, synthetic construct
  source 1..22: mol_type = other RNA
agcagggctcagcggggacagc

SEQ ID NO: 20646 - RNA, 22 nt, synthetic construct
  source 1..22: mol_type = other RNA
ggctggtgtcacctgaagactc

SEQ ID NO: 20647 - RNA, 22 nt, synthetic construct
  source 1..22: mol_type = other RNA
ttctgtacgtctgacaggcaat

SEQ ID NO: 20648 - RNA, 22 nt, synthetic construct
  source 1..22: mol_type = other RNA
gctgggggcctcagtgccacta

SEQ ID NO: 20649 - RNA, 22 nt, synthetic construct
  source 1..22: mol_type = other RNA
gctaggacccctccatgtgggc

SEQ ID NO: 20650 - RNA, 22 nt, synthetic construct
  source 1..22: mol_type = other RNA
ggcttcctcatagtatggtggc

SEQ ID NO: 20651 - RNA, 22 nt, synthetic construct
  source 1..22: mol_type = other RNA
gagggtgtcccaaaaagaaagg

SEQ ID NO: 20652 - RNA, 22 nt, synthetic construct
  source 1..22: mol_type = other RNA
cataacctagccttagaagtca

SEQ ID NO: 20653 - RNA, 22 nt, synthetic construct
  source 1..22: mol_type = other RNA
ataacctagccttagaagtcac

SEQ ID NO: 20654 - RNA, 22 nt, synthetic construct
  source 1..22: mol_type = other RNA
cttctgctacatatatatgttt

SEQ ID NO: 20655 - RNA, 22 nt, synthetic construct
  source 1..22: mol_type = other RNA
taagaggcagggtctcactctg

SEQ ID NO: 20656 - RNA, 22 nt, synthetic construct
  source 1..22: mol_type = other RNA
aagaggcagggtctcactctgt

SEQ ID NO: 20657 - RNA, 22 nt, synthetic construct
  source 1..22: mol_type = other RNA
agaggcagggtctcactctgtc

SEQ ID NO: 20658 - RNA, 22 nt, synthetic construct
  source 1..22: mol_type = other RNA
atctttagttttatttttgtag

SEQ ID NO: 20659 - RNA, 22 nt, synthetic construct
  source 1..22: mol_type = other RNA
gttttatttttgtagagccagg

SEQ ID NO: 20660 - RNA, 22 nt, synthetic construct
  source 1..22: mol_type = other RNA
tatttttgtagagccagggtct

SEQ ID NO: 20661 - RNA, 22 nt, synthetic construct
  source 1..22: mol_type = other RNA
atttttgtagagccagggtctc

SEQ ID NO: 20662 - RNA, 22 nt, synthetic construct
  source 1..22: mol_type = other RNA
tttttgtagagccagggtctca

SEQ ID NO: 20663 - RNA, 22 nt, synthetic construct
  source 1..22: mol_type = other RNA
ttgtagagccagggtctcacta

SEQ ID NO: 20664 - RNA, 22 nt, synthetic construct
  source 1..22: mol_type = other RNA
tgtagagccagggtctcactat

SEQ ID NO: 20665 - RNA, 22 nt, synthetic construct
  source 1..22: mol_type = other RNA
gtagagccagggtctcactatg

SEQ ID NO: 20666 - RNA, 22 nt, synthetic construct
  source 1..22: mol_type = other RNA
tagagccagggtctcactatgt

SEQ ID NO: 20667 - RNA, 22 nt, synthetic construct
  source 1..22: mol_type = other RNA
cccaggcaggtcttgaactcct

SEQ ID NO: 20668 - RNA, 22 nt, synthetic construct
  source 1..22: mol_type = other RNA
tcctgcctcagcctcccaaagt

SEQ ID NO: 20669 - RNA, 22 nt, synthetic construct
  source 1..22: mol_type = other RNA
caggtgtgaaccaccacaccca

SEQ ID NO: 20670 - RNA, 22 nt, synthetic construct
  source 1..22: mol_type = other RNA
tgttggccagtgtgacaaggat

SEQ ID NO: 20671 - RNA, 22 nt, synthetic construct
  source 1..22: mol_type = other RNA
gccagtgtgacaaggattgcta

SEQ ID NO: 20672 - RNA, 22 nt, synthetic construct
  source 1..22: mol_type = other RNA
ctactgtcctacccaccctcct

SEQ ID NO: 20673 - RNA, 22 nt, synthetic construct
  source 1..22: mol_type = other RNA
accacatgtgcacatgcacgtg

SEQ ID NO: 20674 - RNA, 22 nt, synthetic construct
  source 1..22: mol_type = other RNA
ctgagaggacttttctttgtgg

SEQ ID NO: 20675 - RNA, 22 nt, synthetic construct
  source 1..22: mol_type = other RNA
tgagaggacttttctttgtggc

SEQ ID NO: 20676 - RNA, 22 nt, synthetic construct
  source 1..22: mol_type = other RNA
ctttgtggcttcctaaaattca

SEQ ID NO: 20677 - RNA, 22 nt, synthetic construct
  source 1..22: mol_type = other RNA
tttgtggcttcctaaaattcag

SEQ ID NO: 20678 - RNA, 22 nt, synthetic construct
  source 1..22: mol_type = other RNA
tggcttcctaaaattcagtgga

SEQ ID NO: 20679 - RNA, 22 nt, synthetic construct
  source 1..22: mol_type = other RNA
agtggaaaattaattgtttggg

SEQ ID NO: 20680 - RNA, 22 nt, synthetic construct
  source 1..22: mol_type = other RNA
attgtttggggatgagaaaggt

SEQ ID NO: 20681 - RNA, 22 nt, synthetic construct
  source 1..22: mol_type = other RNA
tttggggatgagaaaggttgaa

SEQ ID NO: 20682 - RNA, 22 nt, synthetic construct
  source 1..22: mol_type = other RNA
ggggatgagaaaggttgaagca

SEQ ID NO: 20683 - RNA, 22 nt, synthetic construct
  source 1..22: mol_type = other RNA
gggatgagaaaggttgaagcac

SEQ ID NO: 20684 - RNA, 22 nt, synthetic construct
  source 1..22: mol_type = other RNA
aagcaccaaaagcttaccaagg

SEQ ID NO: 20685 - RNA, 22 nt, synthetic construct
  source 1..22: mol_type = other RNA
gcctctgcctctgacacacagc

SEQ ID NO: 20686 - RNA, 22 nt, synthetic construct
  source 1..22: mol_type = other RNA
cctctgcctctgacacacagct

SEQ ID NO: 20687 - RNA, 22 nt, synthetic construct
  source 1..22: mol_type = other RNA
ttagcggagacggagtcccacc

SEQ ID NO: 20688 - RNA, 22 nt, synthetic construct
  source 1..22: mol_type = other RNA
tagcggagacggagtcccacct

SEQ ID NO: 20689 - RNA, 22 nt, synthetic construct
  source 1..22: mol_type = other RNA
agcggagacggagtcccacctt

SEQ ID NO: 20690 - RNA, 22 nt, synthetic construct
  source 1..22: mol_type = other RNA
gcggagacggagtcccaccttg

SEQ ID NO: 20691 - RNA, 22 nt, synthetic construct
  source 1..22: mol_type = other RNA
tacccagcgagctgccggcacg

SEQ ID NO: 20692 - RNA, 22 nt, synthetic construct
  source 1..22: mol_type = other RNA
cttttcactcgggcatagtctg

SEQ ID NO: 20693 - RNA, 22 nt, synthetic construct
  source 1..22: mol_type = other RNA
cactcgggcatagtctgctcag

SEQ ID NO: 20694 - RNA, 22 nt, synthetic construct
  source 1..22: mol_type = other RNA
actcgggcatagtctgctcaga

SEQ ID NO: 20695 - RNA, 22 nt, synthetic construct
  source 1..22: mol_type = other RNA
aagacatcttagcttactcctg

SEQ ID NO: 20696 - RNA, 22 nt, synthetic construct
  source 1..22: mol_type = other RNA
agctccagctcaccagccccag

SEQ ID NO: 20697 - RNA, 22 nt, synthetic construct
  source 1..22: mol_type = other RNA
ccaagctctgctcctctcccca

SEQ ID NO: 20698 - RNA, 22 nt, synthetic construct
  source 1..22: mol_type = other RNA
atgatctttgcagacaggcaag

SEQ ID NO: 20699 - RNA, 22 nt, synthetic construct
  source 1..22: mol_type = other RNA
cagacaggcaagcacctcctgc

SEQ ID NO: 20700 - RNA, 22 nt, synthetic construct
  source 1..22: mol_type = other RNA
agcttgtaaatagctcaggtgt

SEQ ID NO: 20701 - RNA, 22 nt, synthetic construct
  source 1..22: mol_type = other RNA
ttggtctgacccactgcttttg

SEQ ID NO: 20702 - RNA, 22 nt, synthetic construct
  source 1..22: mol_type = other RNA
tggtctgacccactgcttttgg

SEQ ID NO: 20703 - RNA, 22 nt, synthetic construct
  source 1..22: mol_type = other RNA
ggtctgacccactgcttttggt

SEQ ID NO: 20704 - RNA, 22 nt, synthetic construct
  source 1..22: mol_type = other RNA
gtctgacccactgcttttggtc

SEQ ID NO: 20705 - RNA, 22 nt, synthetic construct
  source 1..22: mol_type = other RNA
ggtctgtgtgatgatgaaatga

SEQ ID NO: 20706 - RNA, 22 nt, synthetic construct
  source 1..22: mol_type = other RNA
gtctgtgtgatgatgaaatgag

SEQ ID NO: 20707 - RNA, 22 nt, synthetic construct
  source 1..22: mol_type = other RNA
ttaacactaacgatttgttaat

SEQ ID NO: 20708 - RNA, 22 nt, synthetic construct
  source 1..22: mol_type = other RNA
acactaacgatttgttaatgat

SEQ ID NO: 20709 - RNA, 22 nt, synthetic construct
  source 1..22: mol_type = other RNA
gttaatgatagctactgtttat

SEQ ID NO: 20710 - RNA, 22 nt, synthetic construct
  source 1..22: mol_type = other RNA
ttaatgatagctactgtttatt

SEQ ID NO: 20711 - RNA, 22 nt, synthetic construct
  source 1..22: mol_type = other RNA
atgatagctactgtttattatt

SEQ ID NO: 20712 - RNA, 22 nt, synthetic construct
  source 1..22: mol_type = other RNA
attattttatttaatttttttg

SEQ ID NO: 20713 - RNA, 22 nt, synthetic construct
  source 1..22: mol_type = other RNA
ttattttatttaatttttttga

SEQ ID NO: 20714 - RNA, 22 nt, synthetic construct
  source 1..22: mol_type = other RNA
ttttatttaatttttttgagac

SEQ ID NO: 20715 - RNA, 22 nt, synthetic construct
  source 1..22: mol_type = other RNA
tatttaatttttttgagacaga

SEQ ID NO: 20716 - RNA, 22 nt, synthetic construct
  source 1..22: mol_type = other RNA
atttaatttttttgagacagag

SEQ ID NO: 20717 - RNA, 22 nt, synthetic construct
  source 1..22: mol_type = other RNA
tttaatttttttgagacagagt

SEQ ID NO: 20718 - RNA, 22 nt, synthetic construct
  source 1..22: mol_type = other RNA
aatttttttgagacagagtttt

SEQ ID NO: 20719 - RNA, 22 nt, synthetic construct
  source 1..22: mol_type = other RNA
atttttttgagacagagttttc

SEQ ID NO: 20720 - RNA, 22 nt, synthetic construct
  source 1..22: mol_type = other RNA
ttttgagacagagttttcactc

SEQ ID NO: 20721 - RNA, 22 nt, synthetic construct
  source 1..22: mol_type = other RNA
tttgagacagagttttcactct

SEQ ID NO: 20722 - RNA, 22 nt, synthetic construct
  source 1..22: mol_type = other RNA
ttgagacagagttttcactctt

SEQ ID NO: 20723 - RNA, 22 nt, synthetic construct
  source 1..22: mol_type = other RNA
tgagacagagttttcactctta

SEQ ID NO: 20724 - RNA, 22 nt, synthetic construct
  source 1..22: mol_type = other RNA
gagacagagttttcactcttat

SEQ ID NO: 20725 - RNA, 22 nt, synthetic construct
  source 1..22: mol_type = other RNA
agacagagttttcactcttatt

SEQ ID NO: 20726 - RNA, 22 nt, synthetic construct
  source 1..22: mol_type = other RNA
tcactcttattgcccacgctgg

SEQ ID NO: 20727 - RNA, 22 nt, synthetic construct
  source 1..22: mol_type = other RNA
cactcttattgcccacgctgga

SEQ ID NO: 20728 - RNA, 22 nt, synthetic construct
  source 1..22: mol_type = other RNA
actcttattgcccacgctggag

SEQ ID NO: 20729 - RNA, 22 nt, synthetic construct
  source 1..22: mol_type = other RNA
cccacgctggagtgcagtggca

SEQ ID NO: 20730 - RNA, 22 nt, synthetic construct
  source 1..22: mol_type = other RNA
aagcaattctcccacctcagcc

SEQ ID NO: 20731 - RNA, 22 nt, synthetic construct
  source 1..22: mol_type = other RNA
tcccacctcagcctcccaagta

SEQ ID NO: 20732 - RNA, 22 nt, synthetic construct
  source 1..22: mol_type = other RNA
caggcatgcaccaccacgcctg

SEQ ID NO: 20733 - RNA, 22 nt, synthetic construct
  source 1..22: mol_type = other RNA
ttgtatttttagtagagatgga

SEQ ID NO: 20734 - RNA, 22 nt, synthetic construct
  source 1..22: mol_type = other RNA
tgtatttttagtagagatggag

SEQ ID NO: 20735 - RNA, 22 nt, synthetic construct
  source 1..22: mol_type = other RNA
gtatttttagtagagatggagt

SEQ ID NO: 20736 - RNA, 22 nt, synthetic construct
  source 1..22: mol_type = other RNA
tatttttagtagagatggagtt

SEQ ID NO: 20737 - RNA, 22 nt, synthetic construct
  source 1..22: mol_type = other RNA
ttagtagagatggagtttcacc

SEQ ID NO: 20738 - RNA, 22 nt, synthetic construct
  source 1..22: mol_type = other RNA
tagtagagatggagtttcacca

SEQ ID NO: 20739 - RNA, 22 nt, synthetic construct
  source 1..22: mol_type = other RNA
agtagagatggagtttcaccat

SEQ ID NO: 20740 - RNA, 22 nt, synthetic construct
  source 1..22: mol_type = other RNA
gtagagatggagtttcaccatg

SEQ ID NO: 20741 - RNA, 22 nt, synthetic construct
  source 1..22: mol_type = other RNA
caccatgttggccaggctggta

SEQ ID NO: 20742 - RNA, 22 nt, synthetic construct
  source 1..22: mol_type = other RNA
accatgttggccaggctggtaa

SEQ ID NO: 20743 - RNA, 22 nt, synthetic construct
  source 1..22: mol_type = other RNA
gccaggctggtaatctgcctgc

SEQ ID NO: 20744 - RNA, 22 nt, synthetic construct
  source 1..22: mol_type = other RNA
caggggtgagccaccgcacccg

SEQ ID NO: 20745 - RNA, 22 nt, synthetic construct
  source 1..22: mol_type = other RNA
atttaatgagcagatacatgca

SEQ ID NO: 20746 - RNA, 22 nt, synthetic construct
  source 1..22: mol_type = other RNA
tttaatgagcagatacatgcaa

SEQ ID NO: 20747 - RNA, 22 nt, synthetic construct
  source 1..22: mol_type = other RNA
aatgagcagatacatgcaaagc

SEQ ID NO: 20748 - RNA, 22 nt, synthetic construct
  source 1..22: mol_type = other RNA
atgagcagatacatgcaaagcc

SEQ ID NO: 20749 - RNA, 22 nt, synthetic construct
  source 1..22: mol_type = other RNA
aaagcgctcagaaagtattagc

SEQ ID NO: 20750 - RNA, 22 nt, synthetic construct
  source 1..22: mol_type = other RNA
gctcaataagtgatgactgtgt

SEQ ID NO: 20751 - RNA, 22 nt, synthetic construct
  source 1..22: mol_type = other RNA
cctgggctcaacgcccacctca

SEQ ID NO: 20752 - RNA, 22 nt, synthetic construct
  source 1..22: mol_type = other RNA
tctgtgcctcagtctcctcatt

SEQ ID NO: 20753 - RNA, 22 nt, synthetic construct
  source 1..22: mol_type = other RNA
gtaaaatgggcataaccacagc

SEQ ID NO: 20754 - RNA, 22 nt, synthetic construct
  source 1..22: mol_type = other RNA
taaaatgggcataaccacagca

SEQ ID NO: 20755 - RNA, 22 nt, synthetic construct
  source 1..22: mol_type = other RNA
taggattatgtgaaggtgtggt

SEQ ID NO: 20756 - RNA, 22 nt, synthetic construct
  source 1..22: mol_type = other RNA
tgtgaaggtgtggtgagctaat

SEQ ID NO: 20757 - RNA, 22 nt, synthetic construct
  source 1..22: mol_type = other RNA
agaattggagctcaataacatg

SEQ ID NO: 20758 - RNA, 22 nt, synthetic construct
  source 1..22: mol_type = other RNA
gagctcaataacatgttggctg

SEQ ID NO: 20759 - RNA, 22 nt, synthetic construct
  source 1..22: mol_type = other RNA
gctgtcattattacatatatct

SEQ ID NO: 20760 - RNA, 22 nt, synthetic construct
  source 1..22: mol_type = other RNA
ttacatatatctgtgtttcatt

SEQ ID NO: 20761 - RNA, 22 nt, synthetic construct
  source 1..22: mol_type = other RNA
catatatctgtgtttcattctt

SEQ ID NO: 20762 - RNA, 22 nt, synthetic construct
  source 1..22: mol_type = other RNA
cattcttgcctctggctggaat

SEQ ID NO: 20763 - RNA, 22 nt, synthetic construct
  source 1..22: mol_type = other RNA
attcttgcctctggctggaatg

SEQ ID NO: 20764 - RNA, 22 nt, synthetic construct
  source 1..22: mol_type = other RNA
ttgcctctggctggaatgttct

SEQ ID NO: 20765 - RNA, 22 nt, synthetic construct
  source 1..22: mol_type = other RNA
ttcccagctctccatatggctg

SEQ ID NO: 20766 - RNA, 22 nt, synthetic construct
  source 1..22: mol_type = other RNA
ctcatccttcgggacttgcccc

SEQ ID NO: 20767 - RNA, 22 nt, synthetic construct
  source 1..22: mol_type = other RNA
tcatccttcgggacttgcccca

SEQ ID NO: 20768 - RNA, 22 nt, synthetic construct
  source 1..22: mol_type = other RNA
tccaaccccatcactagtttta

SEQ ID NO: 20769 - RNA, 22 nt, synthetic construct
  source 1..22: mol_type = other RNA
tatctttttcacttatttatgc

SEQ ID NO: 20770 - RNA, 22 nt, synthetic construct
  source 1..22: mol_type = other RNA
atctttttcacttatttatgca

SEQ ID NO: 20771 - RNA, 22 nt, synthetic construct
  source 1..22: mol_type = other RNA
tctttttcacttatttatgcag

SEQ ID NO: 20772 - RNA, 22 nt, synthetic construct
  source 1..22: mol_type = other RNA
tcacttatttatgcagtctgct

SEQ ID NO: 20773 - RNA, 22 nt, synthetic construct
  source 1..22: mol_type = other RNA
cacttatttatgcagtctgctc

SEQ ID NO: 20774 - RNA, 22 nt, synthetic construct
  source 1..22: mol_type = other RNA
acttatttatgcagtctgctct

SEQ ID NO: 20775 - RNA, 22 nt, synthetic construct
  source 1..22: mol_type = other RNA
atgcagtctgctcttgtcctag

SEQ ID NO: 20776 - RNA, 22 nt, synthetic construct
  source 1..22: mol_type = other RNA
tgcagtctgctcttgtcctagg

SEQ ID NO: 20777 - RNA, 22 nt, synthetic construct
  source 1..22: mol_type = other RNA
tacactgctgtgccctctgtac

SEQ ID NO: 20778 - RNA, 22 nt, synthetic construct
  source 1..22: mol_type = other RNA
cattcattctgcaaatacatac

SEQ ID NO: 20779 - RNA, 22 nt, synthetic construct
  source 1..22: mol_type = other RNA
attcattctgcaaatacatact

SEQ ID NO: 20780 - RNA, 22 nt, synthetic construct
  source 1..22: mol_type = other RNA
attctgcaaatacatactgaca

SEQ ID NO: 20781 - RNA, 22 nt, synthetic construct
  source 1..22: mol_type = other RNA
tgcaaatacatactgacagcac

SEQ ID NO: 20782 - RNA, 22 nt, synthetic construct
  source 1..22: mol_type = other RNA
ctgccctggtgagtcttatatt

SEQ ID NO: 20783 - RNA, 22 nt, synthetic construct
  source 1..22: mol_type = other RNA
tagcaaattaaaaaaactcttt

SEQ ID NO: 20784 - RNA, 22 nt, synthetic construct
  source 1..22: mol_type = other RNA
agcaaattaaaaaaactctttg

SEQ ID NO: 20785 - RNA, 22 nt, synthetic construct
  source 1..22: mol_type = other RNA
gcaaattaaaaaaactctttgg

SEQ ID NO: 20786 - RNA, 22 nt, synthetic construct
  source 1..22: mol_type = other RNA
aaaaaactctttggacagggct

SEQ ID NO: 20787 - RNA, 22 nt, synthetic construct
  source 1..22: mol_type = other RNA
gacagggctgccaggtgaggtt

SEQ ID NO: 20788 - RNA, 22 nt, synthetic construct
  source 1..22: mol_type = other RNA
gccagtctgtacactgcacaaa

SEQ ID NO: 20789 - RNA, 22 nt, synthetic construct
  source 1..22: mol_type = other RNA
tgcttgccaaactgggagtcct

SEQ ID NO: 20790 - RNA, 22 nt, synthetic construct
  source 1..22: mol_type = other RNA
aacccagaggggcatcttttcg

SEQ ID NO: 20791 - RNA, 22 nt, synthetic construct
  source 1..22: mol_type = other RNA
acccagaggggcatcttttcgt

SEQ ID NO: 20792 - RNA, 22 nt, synthetic construct
  source 1..22: mol_type = other RNA
cgtagttaacgcacagtcatcg

SEQ ID NO: 20793 - RNA, 22 nt, synthetic construct
  source 1..22: mol_type = other RNA
gtagttaacgcacagtcatcgt

SEQ ID NO: 20794 - RNA, 22 nt, synthetic construct
  source 1..22: mol_type = other RNA
acgcacagtcatcgtaagatgt

SEQ ID NO: 20795 - RNA, 22 nt, synthetic construct
  source 1..22: mol_type = other RNA
ctgtctccgtgtcacagatcta

SEQ ID NO: 20796 - RNA, 22 nt, synthetic construct
  source 1..22: mol_type = other RNA
gaggacctctctgcagggacag

SEQ ID NO: 20797 - RNA, 22 nt, synthetic construct
  source 1..22: mol_type = other RNA
gtcaggtggtaaagcgctgctc

SEQ ID NO: 20798 - RNA, 22 nt, synthetic construct
  source 1..22: mol_type = other RNA
tcaggtggtaaagcgctgctcg

SEQ ID NO: 20799 - RNA, 22 nt, synthetic construct
  source 1..22: mol_type = other RNA
catgtccagtggattgtaagtc

SEQ ID NO: 20800 - RNA, 22 nt, synthetic construct
  source 1..22: mol_type = other RNA
taagtccacgcaccttccaaat

SEQ ID NO: 20801 - RNA, 22 nt, synthetic construct
  source 1..22: mol_type = other RNA
tccctggggctctcaaatgtct

SEQ ID NO: 20802 - RNA, 22 nt, synthetic construct
  source 1..22: mol_type = other RNA
ccctggggctctcaaatgtctt

SEQ ID NO: 20803 - RNA, 22 nt, synthetic construct
  source 1..22: mol_type = other RNA
cctggggctctcaaatgtcttc

SEQ ID NO: 20804 - RNA, 22 nt, synthetic construct
  source 1..22: mol_type = other RNA
cagatttcgtagcttttctttc

SEQ ID NO: 20805 - RNA, 22 nt, synthetic construct
  source 1..22: mol_type = other RNA
agatttcgtagcttttctttct

SEQ ID NO: 20806 - RNA, 22 nt, synthetic construct
  source 1..22: mol_type = other RNA
cgtagcttttctttctttagca

SEQ ID NO: 20807 - RNA, 22 nt, synthetic construct
  source 1..22: mol_type = other RNA
gtagcttttctttctttagcat

SEQ ID NO: 20808 - RNA, 22 nt, synthetic construct
  source 1..22: mol_type = other RNA
ctttctttagcatcacttgagg

SEQ ID NO: 20809 - RNA, 22 nt, synthetic construct
  source 1..22: mol_type = other RNA
tttctttagcatcacttgaggg

SEQ ID NO: 20810 - RNA, 22 nt, synthetic construct
  source 1..22: mol_type = other RNA
tttagcatcacttgagggcaag

SEQ ID NO: 20811 - RNA, 22 nt, synthetic construct
  source 1..22: mol_type = other RNA
gcatcacttgagggcaagtggt

SEQ ID NO: 20812 - RNA, 22 nt, synthetic construct
  source 1..22: mol_type = other RNA
tgccgcctgtactctcccacac

SEQ ID NO: 20813 - RNA, 22 nt, synthetic construct
  source 1..22: mol_type = other RNA
gaaccctgcttcacttggtgtg

SEQ ID NO: 20814 - RNA, 22 nt, synthetic construct
  source 1..22: mol_type = other RNA
aaccctgcttcacttggtgtgt

SEQ ID NO: 20815 - RNA, 22 nt, synthetic construct
  source 1..22: mol_type = other RNA
aaatcaagtgctctgcaaactg

SEQ ID NO: 20816 - RNA, 22 nt, synthetic construct
  source 1..22: mol_type = other RNA
ctgcttgtattccgtgaaacta

SEQ ID NO: 20817 - RNA, 22 nt, synthetic construct
  source 1..22: mol_type = other RNA
cgtgaaactacaagctcccaat

SEQ ID NO: 20818 - RNA, 22 nt, synthetic construct
  source 1..22: mol_type = other RNA
cactcatttaatccctctcttg

SEQ ID NO: 20819 - RNA, 22 nt, synthetic construct
  source 1..22: mol_type = other RNA
aatccctctcttgctctgttgc

SEQ ID NO: 20820 - RNA, 22 nt, synthetic construct
  source 1..22: mol_type = other RNA
atccctctcttgctctgttgcc

SEQ ID NO: 20821 - RNA, 22 nt, synthetic construct
  source 1..22: mol_type = other RNA
cccaggctggaatgcagtggca

SEQ ID NO: 20822 - RNA, 22 nt, synthetic construct
  source 1..22: mol_type = other RNA
caagcaattctcctgcctcagc

SEQ ID NO: 20823 - RNA, 22 nt, synthetic construct
  source 1..22: mol_type = other RNA
aagcaattctcctgcctcagcc

SEQ ID NO: 20824 - RNA, 22 nt, synthetic construct
  source 1..22: mol_type = other RNA
tcctgcctcagcctcccgagta

SEQ ID NO: 20825 - RNA, 22 nt, synthetic construct
  source 1..22: mol_type = other RNA
ttttgtatttttagtagagatg

SEQ ID NO: 20826 - RNA, 22 nt, synthetic construct
  source 1..22: mol_type = other RNA
tttgtatttttagtagagatgg

SEQ ID NO: 20827 - RNA, 22 nt, synthetic construct
  source 1..22: mol_type = other RNA
ttgtatttttagtagagatggg

SEQ ID NO: 20828 - RNA, 22 nt, synthetic construct
  source 1..22: mol_type = other RNA
tgtatttttagtagagatgggg

SEQ ID NO: 20829 - RNA, 22 nt, synthetic construct
  source 1..22: mol_type = other RNA
gtatttttagtagagatggggt

SEQ ID NO: 20830 - RNA, 22 nt, synthetic construct
  source 1..22: mol_type = other RNA
tatttttagtagagatggggtt

SEQ ID NO: 20831 - RNA, 22 nt, synthetic construct
  source 1..22: mol_type = other RNA
ttagtagagatggggtttcacc

SEQ ID NO: 20832 - RNA, 22 nt, synthetic construct
  source 1..22: mol_type = other RNA
tagtagagatggggtttcaccg

SEQ ID NO: 20833 - RNA, 22 nt, synthetic construct
  source 1..22: mol_type = other RNA
agtagagatggggtttcaccgt

SEQ ID NO: 20834 - RNA, 22 nt, synthetic construct
  source 1..22: mol_type = other RNA
gtagagatggggtttcaccgtg

SEQ ID NO: 20835 - RNA, 22 nt, synthetic construct
  source 1..22: mol_type = other RNA
caccgtggtggccaggctggtc

SEQ ID NO: 20836 - RNA, 22 nt, synthetic construct
  source 1..22: mol_type = other RNA
accgtggtggccaggctggtct

SEQ ID NO: 20837 - RNA, 22 nt, synthetic construct
  source 1..22: mol_type = other RNA
caggcatgagccaccatgccaa

SEQ ID NO: 20838 - RNA, 22 nt, synthetic construct
  source 1..22: mol_type = other RNA
atgaaggtctaccatgtgcctg

SEQ ID NO: 20839 - RNA, 22 nt, synthetic construct
  source 1..22: mol_type = other RNA
aggcctggtttccagcttggcc

SEQ ID NO: 20840 - RNA, 22 nt, synthetic construct
  source 1..22: mol_type = other RNA
ccagcttggccttcaggctttt

SEQ ID NO: 20841 - RNA, 22 nt, synthetic construct
  source 1..22: mol_type = other RNA
cagcttggccttcaggcttttc

SEQ ID NO: 20842 - RNA, 22 nt, synthetic construct
  source 1..22: mol_type = other RNA
acgccagcccgactggggcaga

SEQ ID NO: 20843 - RNA, 22 nt, synthetic construct
  source 1..22: mol_type = other RNA
gtcagccacaaggttctgccta

SEQ ID NO: 20844 - RNA, 22 nt, synthetic construct
  source 1..22: mol_type = other RNA
tcagccacaaggttctgcctag

SEQ ID NO: 20845 - RNA, 22 nt, synthetic construct
  source 1..22: mol_type = other RNA
tgcctagaactcctttcccgaa

SEQ ID NO: 20846 - RNA, 22 nt, synthetic construct
  source 1..22: mol_type = other RNA
ccgaatctcaaagttaaaaaaa

SEQ ID NO: 20847 - RNA, 22 nt, synthetic construct
  source 1..22: mol_type = other RNA
aaaaaaaaggcagggccccagg

SEQ ID NO: 20848 - RNA, 22 nt, synthetic construct
  source 1..22: mol_type = other RNA
gagttgcatacattttttttta

SEQ ID NO: 20849 - RNA, 22 nt, synthetic construct
  source 1..22: mol_type = other RNA
catacatttttttttaatccaa

SEQ ID NO: 20850 - RNA, 22 nt, synthetic construct
  source 1..22: mol_type = other RNA
ttttttaatccaaagaagtaag

SEQ ID NO: 20851 - RNA, 22 nt, synthetic construct
  source 1..22: mol_type = other RNA
tttttaatccaaagaagtaagc

SEQ ID NO: 20852 - RNA, 22 nt, synthetic construct
  source 1..22: mol_type = other RNA
ttttaatccaaagaagtaagcc

SEQ ID NO: 20853 - RNA, 22 nt, synthetic construct
  source 1..22: mol_type = other RNA
tttaatccaaagaagtaagcct

SEQ ID NO: 20854 - RNA, 22 nt, synthetic construct
  source 1..22: mol_type = other RNA
ttaatccaaagaagtaagcctc

SEQ ID NO: 20855 - RNA, 22 nt, synthetic construct
  source 1..22: mol_type = other RNA
taatccaaagaagtaagcctcc

SEQ ID NO: 20856 - RNA, 22 nt, synthetic construct
  source 1..22: mol_type = other RNA
aatccaaagaagtaagcctcct

SEQ ID NO: 20857 - RNA, 22 nt, synthetic construct
  source 1..22: mol_type = other RNA
atccaaagaagtaagcctccta

SEQ ID NO: 20858 - RNA, 22 nt, synthetic construct
  source 1..22: mol_type = other RNA
cttagacaggtttatcagaatt

SEQ ID NO: 20859 - RNA, 22 nt, synthetic construct
  source 1..22: mol_type = other RNA
atcagaattaagtaggcacaac

SEQ ID NO: 20860 - RNA, 22 nt, synthetic construct
  source 1..22: mol_type = other RNA
tcagaattaagtaggcacaaca

SEQ ID NO: 20861 - RNA, 22 nt, synthetic construct
  source 1..22: mol_type = other RNA
agtaggcacaacactcatactt

SEQ ID NO: 20862 - RNA, 22 nt, synthetic construct
  source 1..22: mol_type = other RNA
agaaaagcatttccagccaggg

SEQ ID NO: 20863 - RNA, 22 nt, synthetic construct
  source 1..22: mol_type = other RNA
ccagccaggggagtaacgtggc

SEQ ID NO: 20864 - RNA, 22 nt, synthetic construct
  source 1..22: mol_type = other RNA
cagccaggggagtaacgtggca

SEQ ID NO: 20865 - RNA, 22 nt, synthetic construct
  source 1..22: mol_type = other RNA
tgccaacttgctgaagaacgag

SEQ ID NO: 20866 - RNA, 22 nt, synthetic construct
  source 1..22: mol_type = other RNA
gccaacttgctgaagaacgagt

SEQ ID NO: 20867 - RNA, 22 nt, synthetic construct
  source 1..22: mol_type = other RNA
ccaacttgctgaagaacgagta

SEQ ID NO: 20868 - RNA, 22 nt, synthetic construct
  source 1..22: mol_type = other RNA
tcttctgagtcacccctgaaac

SEQ ID NO: 20869 - RNA, 22 nt, synthetic construct
  source 1..22: mol_type = other RNA
cttctgagtcacccctgaaaca

SEQ ID NO: 20870 - RNA, 22 nt, synthetic construct
  source 1..22: mol_type = other RNA
ttctgagtcacccctgaaacag

SEQ ID NO: 20871 - RNA, 22 nt, synthetic construct
  source 1..22: mol_type = other RNA
gcgtgtgtccgcagtttgaagt

SEQ ID NO: 20872 - RNA, 22 nt, synthetic construct
  source 1..22: mol_type = other RNA
cgtgtgtccgcagtttgaagtg

SEQ ID NO: 20873 - RNA, 22 nt, synthetic construct
  source 1..22: mol_type = other RNA
gaagtgtcctctccgaaggtga

SEQ ID NO: 20874 - RNA, 22 nt, synthetic construct
  source 1..22: mol_type = other RNA
aagtgtcctctccgaaggtgaa

SEQ ID NO: 20875 - RNA, 22 nt, synthetic construct
  source 1..22: mol_type = other RNA
ctgtaaacatccatcgcagctg

SEQ ID NO: 20876 - RNA, 22 nt, synthetic construct
  source 1..22: mol_type = other RNA
gacactgcaggcagatgaggtc

SEQ ID NO: 20877 - RNA, 22 nt, synthetic construct
  source 1..22: mol_type = other RNA
acactgcaggcagatgaggtct

SEQ ID NO: 20878 - RNA, 22 nt, synthetic construct
  source 1..22: mol_type = other RNA
ccccttctgtgggagcaggtgc

SEQ ID NO: 20879 - RNA, 22 nt, synthetic construct
  source 1..22: mol_type = other RNA
aaacaggaacctctctgttggc

SEQ ID NO: 20880 - RNA, 22 nt, synthetic construct
  source 1..22: mol_type = other RNA
gcacgaagcttttgaggggagc

SEQ ID NO: 20881 - RNA, 22 nt, synthetic construct
  source 1..22: mol_type = other RNA
gaggggagcaggtctaacaaga

SEQ ID NO: 20882 - RNA, 22 nt, synthetic construct
  source 1..22: mol_type = other RNA
aggggagcaggtctaacaagaa

SEQ ID NO: 20883 - RNA, 22 nt, synthetic construct
  source 1..22: mol_type = other RNA
ttagcacggaagccccaccctg

SEQ ID NO: 20884 - RNA, 22 nt, synthetic construct
  source 1..22: mol_type = other RNA
gcacggaagccccaccctgcca

SEQ ID NO: 20885 - RNA, 22 nt, synthetic construct
  source 1..22: mol_type = other RNA
gctggggacagggaccaatcca

SEQ ID NO: 20886 - RNA, 22 nt, synthetic construct
  source 1..22: mol_type = other RNA
agggaaccactgggagccccag

SEQ ID NO: 20887 - RNA, 22 nt, synthetic construct
  source 1..22: mol_type = other RNA
gggaaccactgggagccccaga

SEQ ID NO: 20888 - RNA, 22 nt, synthetic construct
  source 1..22: mol_type = other RNA
tgcaaatataaaactcttttta

SEQ ID NO: 20889 - RNA, 22 nt, synthetic construct
  source 1..22: mol_type = other RNA
taatgaatttgcctaatttctc

SEQ ID NO: 20890 - RNA, 22 nt, synthetic construct
  source 1..22: mol_type = other RNA
aatgaatttgcctaatttctca

SEQ ID NO: 20891 - RNA, 22 nt, synthetic construct
  source 1..22: mol_type = other RNA
atgaatttgcctaatttctcag

SEQ ID NO: 20892 - RNA, 22 nt, synthetic construct
  source 1..22: mol_type = other RNA
gcctaatttctcagagaccctg

SEQ ID NO: 20893 - RNA, 22 nt, synthetic construct
  source 1..22: mol_type = other RNA
cctaatttctcagagaccctgg

SEQ ID NO: 20894 - RNA, 22 nt, synthetic construct
  source 1..22: mol_type = other RNA
ctcagagaccctgggctggaga

SEQ ID NO: 20895 - RNA, 22 nt, synthetic construct
  source 1..22: mol_type = other RNA
tcagagaccctgggctggagaa

SEQ ID NO: 20896 - RNA, 22 nt, synthetic construct
  source 1..22: mol_type = other RNA
attgggagggaggagggggatg

SEQ ID NO: 20897 - RNA, 22 nt, synthetic construct
  source 1..22: mol_type = other RNA
ttgggagggaggagggggatgc

SEQ ID NO: 20898 - RNA, 22 nt, synthetic construct
  source 1..22: mol_type = other RNA
ggagggaggagggggatgctgg

SEQ ID NO: 20899 - RNA, 22 nt, synthetic construct
  source 1..22: mol_type = other RNA
caacctacaggaaggcaatagc

SEQ ID NO: 20900 - RNA, 22 nt, synthetic construct
  source 1..22: mol_type = other RNA
ctcagcagccccacttggctct

SEQ ID NO: 20901 - RNA, 22 nt, synthetic construct
  source 1..22: mol_type = other RNA
tcccaggatgcagcatcatctc

SEQ ID NO: 20902 - RNA, 22 nt, synthetic construct
  source 1..22: mol_type = other RNA
cccactgccttctctgtgtgcc

SEQ ID NO: 20903 - RNA, 22 nt, synthetic construct
  source 1..22: mol_type = other RNA
ccactgccttctctgtgtgcct

SEQ ID NO: 20904 - RNA, 22 nt, synthetic construct
  source 1..22: mol_type = other RNA
ccatgcccaacccctctgcagc

SEQ ID NO: 20905 - RNA, 22 nt, synthetic construct
  source 1..22: mol_type = other RNA
caagcctcatctcccagctcac

SEQ ID NO: 20906 - RNA, 22 nt, synthetic construct
  source 1..22: mol_type = other RNA
cgcaaacttcactgaacatctc

SEQ ID NO: 20907 - RNA, 22 nt, synthetic construct
  source 1..22: mol_type = other RNA
aacatgtgacatgtattgttgt

SEQ ID NO: 20908 - RNA, 22 nt, synthetic construct
  source 1..22: mol_type = other RNA
ttgtttgacagggtgctattga

SEQ ID NO: 20909 - RNA, 22 nt, synthetic construct
  source 1..22: mol_type = other RNA
tttgacagggtgctattgacat

SEQ ID NO: 20910 - RNA, 22 nt, synthetic construct
  source 1..22: mol_type = other RNA
gacagggtgctattgacatttg

SEQ ID NO: 20911 - RNA, 22 nt, synthetic construct
  source 1..22: mol_type = other RNA
acagggtgctattgacatttgg

SEQ ID NO: 20912 - RNA, 22 nt, synthetic construct
  source 1..22: mol_type = other RNA
acatttggggtaggacaattct

SEQ ID NO: 20913 - RNA, 22 nt, synthetic construct
  source 1..22: mol_type = other RNA
ggggtaggacaattcttggagg

SEQ ID NO: 20914 - RNA, 22 nt, synthetic construct
  source 1..22: mol_type = other RNA
gggtaggacaattcttggaggt

SEQ ID NO: 20915 - RNA, 22 nt, synthetic construct
  source 1..22: mol_type = other RNA
ttggaggtggggtggctgttct

SEQ ID NO: 20916 - RNA, 22 nt, synthetic construct
  source 1..22: mol_type = other RNA
tgggcactgagcatttagcagc

SEQ ID NO: 20917 - RNA, 22 nt, synthetic construct
  source 1..22: mol_type = other RNA
agcagcatctctggctccaggc

SEQ ID NO: 20918 - RNA, 22 nt, synthetic construct
  source 1..22: mol_type = other RNA
gcagcatctctggctccaggcc

SEQ ID NO: 20919 - RNA, 22 nt, synthetic construct
  source 1..22: mol_type = other RNA
ccaaggtcgacctaagggggcg

SEQ ID NO: 20920 - RNA, 22 nt, synthetic construct
  source 1..22: mol_type = other RNA
caaggtcgacctaagggggcgg

SEQ ID NO: 20921 - RNA, 22 nt, synthetic construct
  source 1..22: mol_type = other RNA
ccattgagacccatgcatcgta

SEQ ID NO: 20922 - RNA, 22 nt, synthetic construct
  source 1..22: mol_type = other RNA
cattgagacccatgcatcgtat

SEQ ID NO: 20923 - RNA, 22 nt, synthetic construct
  source 1..22: mol_type = other RNA
agacccatgcatcgtataggat

SEQ ID NO: 20924 - RNA, 22 nt, synthetic construct
  source 1..22: mol_type = other RNA
ttatcatttaataggataagaa

SEQ ID NO: 20925 - RNA, 22 nt, synthetic construct
  source 1..22: mol_type = other RNA
aataggataagaaattgaggtt

SEQ ID NO: 20926 - RNA, 22 nt, synthetic construct
  source 1..22: mol_type = other RNA
ataggataagaaattgaggttc

SEQ ID NO: 20927 - RNA, 22 nt, synthetic construct
  source 1..22: mol_type = other RNA
aggttcagagaagccaagtaac

SEQ ID NO: 20928 - RNA, 22 nt, synthetic construct
  source 1..22: mol_type = other RNA
agagaagccaagtaacctgcct

SEQ ID NO: 20929 - RNA, 22 nt, synthetic construct
  source 1..22: mol_type = other RNA
cctgagctcttagcagacgctg

SEQ ID NO: 20930 - RNA, 22 nt, synthetic construct
  source 1..22: mol_type = other RNA
ctgagctcttagcagacgctga

SEQ ID NO: 20931 - RNA, 22 nt, synthetic construct
  source 1..22: mol_type = other RNA
cctccactcactcttccttgca

SEQ ID NO: 20932 - RNA, 22 nt, synthetic construct
  source 1..22: mol_type = other RNA
ctgaggcctttctctgcctcca

SEQ ID NO: 20933 - RNA, 22 nt, synthetic construct
  source 1..22: mol_type = other RNA
tctgcctccagagcctgcttgg

SEQ ID NO: 20934 - RNA, 22 nt, synthetic construct
  source 1..22: mol_type = other RNA
ctcagattcagccgcacagatg

SEQ ID NO: 20935 - RNA, 22 nt, synthetic construct
  source 1..22: mol_type = other RNA
agccgcacagatgctcactgca

SEQ ID NO: 20936 - RNA, 22 nt, synthetic construct
  source 1..22: mol_type = other RNA
gtgtggatagggtgttagagaa

SEQ ID NO: 20937 - RNA, 22 nt, synthetic construct
  source 1..22: mol_type = other RNA
tgtggatagggtgttagagaac

SEQ ID NO: 20938 - RNA, 22 nt, synthetic construct
  source 1..22: mol_type = other RNA
gagaacatggaatcagctggat

SEQ ID NO: 20939 - RNA, 22 nt, synthetic construct
  source 1..22: mol_type = other RNA
atgcttgtaatcccagcacttt

SEQ ID NO: 20940 - RNA, 22 nt, synthetic construct
  source 1..22: mol_type = other RNA
ggaggctggggtgggaggatca

SEQ ID NO: 20941 - RNA, 22 nt, synthetic construct
  source 1..22: mol_type = other RNA
gagaccagcctgggcaacacag

SEQ ID NO: 20942 - RNA, 22 nt, synthetic construct
  source 1..22: mol_type = other RNA
agaccagcctgggcaacacagt

SEQ ID NO: 20943 - RNA, 22 nt, synthetic construct
  source 1..22: mol_type = other RNA
aaaaattagccaggcatagtgt

SEQ ID NO: 20944 - RNA, 22 nt, synthetic construct
  source 1..22: mol_type = other RNA
aaaattagccaggcatagtgta

SEQ ID NO: 20945 - RNA, 22 nt, synthetic construct
  source 1..22: mol_type = other RNA
gccaggcatagtgtagtctcag

SEQ ID NO: 20946 - RNA, 22 nt, synthetic construct
  source 1..22: mol_type = other RNA
cgtgagcccagcagttcaaggc

SEQ ID NO: 20947 - RNA, 22 nt, synthetic construct
  source 1..22: mol_type = other RNA
aaggctgcagtgaactatgact

SEQ ID NO: 20948 - RNA, 22 nt, synthetic construct
  source 1..22: mol_type = other RNA
actaacactccggttttcattg

SEQ ID NO: 20949 - RNA, 22 nt, synthetic construct
  source 1..22: mol_type = other RNA
ctaacactccggttttcattgt

SEQ ID NO: 20950 - RNA, 22 nt, synthetic construct
  source 1..22: mol_type = other RNA
tcattgtgtttatctgtagggt

SEQ ID NO: 20951 - RNA, 22 nt, synthetic construct
  source 1..22: mol_type = other RNA
cattgtgtttatctgtagggtt

SEQ ID NO: 20952 - RNA, 22 nt, synthetic construct
  source 1..22: mol_type = other RNA
attgtgtttatctgtagggtta

SEQ ID NO: 20953 - RNA, 22 nt, synthetic construct
  source 1..22: mol_type = other RNA
tgtttatctgtagggttacctt

SEQ ID NO: 20954 - RNA, 22 nt, synthetic construct
  source 1..22: mol_type = other RNA
atctgtagggttaccttctatt

SEQ ID NO: 20955 - RNA, 22 nt, synthetic construct
  source 1..22: mol_type = other RNA
tctgtagggttaccttctattt

SEQ ID NO: 20956 - RNA, 22 nt, synthetic construct
  source 1..22: mol_type = other RNA
ccttctatttatagcaagtgat

SEQ ID NO: 20957 - RNA, 22 nt, synthetic construct
  source 1..22: mol_type = other RNA
atagcaagtgatgccaagtttc

SEQ ID NO: 20958 - RNA, 22 nt, synthetic construct
  source 1..22: mol_type = other RNA
tagcaagtgatgccaagtttcc

SEQ ID NO: 20959 - RNA, 22 nt, synthetic construct
  source 1..22: mol_type = other RNA
ccatttctggtagtaatatagt

SEQ ID NO: 20960 - RNA, 22 nt, synthetic construct
  source 1..22: mol_type = other RNA
catttctggtagtaatatagtt

SEQ ID NO: 20961 - RNA, 22 nt, synthetic construct
  source 1..22: mol_type = other RNA
ctggtagtaatatagtttttct

SEQ ID NO: 20962 - RNA, 22 nt, synthetic construct
  source 1..22: mol_type = other RNA
tggtagtaatatagtttttctt

SEQ ID NO: 20963 - RNA, 22 nt, synthetic construct
  source 1..22: mol_type = other RNA
ttcttttccaagtcgctcacac

SEQ ID NO: 20964 - RNA, 22 nt, synthetic construct
  source 1..22: mol_type = other RNA
tcttttccaagtcgctcacacc

SEQ ID NO: 20965 - RNA, 22 nt, synthetic construct
  source 1..22: mol_type = other RNA
cttttccaagtcgctcacacct

SEQ ID NO: 20966 - RNA, 22 nt, synthetic construct
  source 1..22: mol_type = other RNA
ttttccaagtcgctcacacctg

SEQ ID NO: 20967 - RNA, 22 nt, synthetic construct
  source 1..22: mol_type = other RNA
ccaagtcgctcacacctgtaat

SEQ ID NO: 20968 - RNA, 22 nt, synthetic construct
  source 1..22: mol_type = other RNA
caagtcgctcacacctgtaatc

SEQ ID NO: 20969 - RNA, 22 nt, synthetic construct
  source 1..22: mol_type = other RNA
ggaggctaaggtgggtggatca

SEQ ID NO: 20970 - RNA, 22 nt, synthetic construct
  source 1..22: mol_type = other RNA
agatcaggagtttgagaccagc

SEQ ID NO: 20971 - RNA, 22 nt, synthetic construct
  source 1..22: mol_type = other RNA
gagaccagcctggccaacatgg

SEQ ID NO: 20972 - RNA, 22 nt, synthetic construct
  source 1..22: mol_type = other RNA
agaccagcctggccaacatggc

SEQ ID NO: 20973 - RNA, 22 nt, synthetic construct
  source 1..22: mol_type = other RNA
gctgggcatggtggcaggtgcc

SEQ ID NO: 20974 - RNA, 22 nt, synthetic construct
  source 1..22: mol_type = other RNA
cagtgagccgagatcacgccac

SEQ ID NO: 20975 - RNA, 22 nt, synthetic construct
  source 1..22: mol_type = other RNA
ctcttttcaaaacattttactt

SEQ ID NO: 20976 - RNA, 22 nt, synthetic construct
  source 1..22: mol_type = other RNA
tcttttcaaaacattttacttt

SEQ ID NO: 20977 - RNA, 22 nt, synthetic construct
  source 1..22: mol_type = other RNA
caaaacattttactttaaaagg

SEQ ID NO: 20978 - RNA, 22 nt, synthetic construct
  source 1..22: mol_type = other RNA
aaaacattttactttaaaagga

SEQ ID NO: 20979 - RNA, 22 nt, synthetic construct
  source 1..22: mol_type = other RNA
tactttaaaaggagccaattta

SEQ ID NO: 20980 - RNA, 22 nt, synthetic construct
  source 1..22: mol_type = other RNA
actttaaaaggagccaatttaa

SEQ ID NO: 20981 - RNA, 22 nt, synthetic construct
  source 1..22: mol_type = other RNA
ctttaaaaggagccaatttaaa

SEQ ID NO: 20982 - RNA, 22 nt, synthetic construct
  source 1..22: mol_type = other RNA
aaaggagccaatttaaagaaaa

SEQ ID NO: 20983 - RNA, 22 nt, synthetic construct
  source 1..22: mol_type = other RNA
aaagaaaactgttaatagttca

SEQ ID NO: 20984 - RNA, 22 nt, synthetic construct
  source 1..22: mol_type = other RNA
aagaaaactgttaatagttcag

SEQ ID NO: 20985 - RNA, 22 nt, synthetic construct
  source 1..22: mol_type = other RNA
atagttcaggtaacaggcagat

SEQ ID NO: 20986 - RNA, 22 nt, synthetic construct
  source 1..22: mol_type = other RNA
aggtaacaggcagatacaggaa

SEQ ID NO: 20987 - RNA, 22 nt, synthetic construct
  source 1..22: mol_type = other RNA
tatgaggtttgaggattttgat

SEQ ID NO: 20988 - RNA, 22 nt, synthetic construct
  source 1..22: mol_type = other RNA
gaggattttgatccaagctggt

SEQ ID NO: 20989 - RNA, 22 nt, synthetic construct
  source 1..22: mol_type = other RNA
aggattttgatccaagctggtc

SEQ ID NO: 20990 - RNA, 22 nt, synthetic construct
  source 1..22: mol_type = other RNA
tgatccaagctggtcccactca

SEQ ID NO: 20991 - RNA, 22 nt, synthetic construct
  source 1..22: mol_type = other RNA
gatccaagctggtcccactcag

SEQ ID NO: 20992 - RNA, 22 nt, synthetic construct
  source 1..22: mol_type = other RNA
atccaagctggtcccactcagt

SEQ ID NO: 20993 - RNA, 22 nt, synthetic construct
  source 1..22: mol_type = other RNA
ctatgtgtagggcgggaggatg

SEQ ID NO: 20994 - RNA, 22 nt, synthetic construct
  source 1..22: mol_type = other RNA
tatgtgtagggcgggaggatgt

SEQ ID NO: 20995 - RNA, 22 nt, synthetic construct
  source 1..22: mol_type = other RNA
tgggacacagttcaattctcat

SEQ ID NO: 20996 - RNA, 22 nt, synthetic construct
  source 1..22: mol_type = other RNA
aattctcatttgtcacacactt

SEQ ID NO: 20997 - RNA, 22 nt, synthetic construct
  source 1..22: mol_type = other RNA
tcatttgtcacacactttggct

SEQ ID NO: 20998 - RNA, 22 nt, synthetic construct
  source 1..22: mol_type = other RNA
gtcacacactttggctattaga

SEQ ID NO: 20999 - RNA, 22 nt, synthetic construct
  source 1..22: mol_type = other RNA
tcacacactttggctattagag

SEQ ID NO: 21000 - RNA, 22 nt, synthetic construct
  source 1..22: mol_type = other RNA
gctattagagatcaaccccttc

SEQ ID NO: 21001 - RNA, 22 nt, synthetic construct
  source 1..22: mol_type = other RNA
gagatcaaccccttcgctcctg

SEQ ID NO: 21002 - RNA, 22 nt, synthetic construct
  source 1..22: mol_type = other RNA
tgaagcatttactttgtgttca

SEQ ID NO: 21003 - RNA, 22 nt, synthetic construct
  source 1..22: mol_type = other RNA
actttgtgttcaccttgtacta

SEQ ID NO: 21004 - RNA, 22 nt, synthetic construct
  source 1..22: mol_type = other RNA
ctttgtgttcaccttgtactac

SEQ ID NO: 21005 - RNA, 22 nt, synthetic construct
  source 1..22: mol_type = other RNA
tgttcaccttgtactactcgaa

SEQ ID NO: 21006 - RNA, 22 nt, synthetic construct
  source 1..22: mol_type = other RNA
accttgtactactcgaactcat

SEQ ID NO: 21007 - RNA, 22 nt, synthetic construct
  source 1..22: mol_type = other RNA
cacatggagctcagagaggtta

SEQ ID NO: 21008 - RNA, 22 nt, synthetic construct
  source 1..22: mol_type = other RNA
acatggagctcagagaggttaa

SEQ ID NO: 21009 - RNA, 22 nt, synthetic construct
  source 1..22: mol_type = other RNA
agcaagccgtgcaaggccacac

SEQ ID NO: 21010 - RNA, 22 nt, synthetic construct
  source 1..22: mol_type = other RNA
gaacccccgtggcctgacccca

SEQ ID NO: 21011 - RNA, 22 nt, synthetic construct
  source 1..22: mol_type = other RNA
aacccccgtggcctgaccccaa

SEQ ID NO: 21012 - RNA, 22 nt, synthetic construct
  source 1..22: mol_type = other RNA
gtcccttttctctgagatgggg

SEQ ID NO: 21013 - RNA, 22 nt, synthetic construct
  source 1..22: mol_type = other RNA
ctctgagatgggggtatccaat

SEQ ID NO: 21014 - RNA, 22 nt, synthetic construct
  source 1..22: mol_type = other RNA
tctgagatgggggtatccaatc

SEQ ID NO: 21015 - RNA, 22 nt, synthetic construct
  source 1..22: mol_type = other RNA
ggcttccctgggccacagtgga

SEQ ID NO: 21016 - RNA, 22 nt, synthetic construct
  source 1..22: mol_type = other RNA
gcttccctgggccacagtggaa

SEQ ID NO: 21017 - RNA, 22 nt, synthetic construct
  source 1..22: mol_type = other RNA
tttttttttttttttgagacag

SEQ ID NO: 21018 - RNA, 22 nt, synthetic construct
  source 1..22: mol_type = other RNA
ttttttttttttttgagacagg

SEQ ID NO: 21019 - RNA, 22 nt, synthetic construct
  source 1..22: mol_type = other RNA
tttttttttttttgagacaggg

SEQ ID NO: 21020 - RNA, 22 nt, synthetic construct
  source 1..22: mol_type = other RNA
ttttttttttttgagacagggt

SEQ ID NO: 21021 - RNA, 22 nt, synthetic construct
  source 1..22: mol_type = other RNA
tttttttttttgagacagggtc

SEQ ID NO: 21022 - RNA, 22 nt, synthetic construct
  source 1..22: mol_type = other RNA
ttttttttttgagacagggtct

SEQ ID NO: 21023 - RNA, 22 nt, synthetic construct
  source 1..22: mol_type = other RNA
tttttttttgagacagggtctt

SEQ ID NO: 21024 - RNA, 22 nt, synthetic construct
  source 1..22: mol_type = other RNA
ttttttttgagacagggtcttg

SEQ ID NO: 21025 - RNA, 22 nt, synthetic construct
  source 1..22: mol_type = other RNA
tttttttgagacagggtcttgc

SEQ ID NO: 21026 - RNA, 22 nt, synthetic construct
  source 1..22: mol_type = other RNA
ttttttgagacagggtcttgct

SEQ ID NO: 21027 - RNA, 22 nt, synthetic construct
  source 1..22: mol_type = other RNA
tttttgagacagggtcttgctt

SEQ ID NO: 21028 - RNA, 22 nt, synthetic construct
  source 1..22: mol_type = other RNA
ttttgagacagggtcttgcttt

SEQ ID NO: 21029 - RNA, 22 nt, synthetic construct
  source 1..22: mol_type = other RNA
tttgagacagggtcttgctttg

SEQ ID NO: 21030 - RNA, 22 nt, synthetic construct
  source 1..22: mol_type = other RNA
ttgagacagggtcttgctttgt

SEQ ID NO: 21031 - RNA, 22 nt, synthetic construct
  source 1..22: mol_type = other RNA
tgagacagggtcttgctttgtc

SEQ ID NO: 21032 - RNA, 22 nt, synthetic construct
  source 1..22: mol_type = other RNA
gagacagggtcttgctttgtca

SEQ ID NO: 21033 - RNA, 22 nt, synthetic construct
  source 1..22: mol_type = other RNA
agacagggtcttgctttgtcac

SEQ ID NO: 21034 - RNA, 22 nt, synthetic construct
  source 1..22: mol_type = other RNA
tcacccaggctggagggcagtg

SEQ ID NO: 21035 - RNA, 22 nt, synthetic construct
  source 1..22: mol_type = other RNA
caggttcaagcaattctcatgc

SEQ ID NO: 21036 - RNA, 22 nt, synthetic construct
  source 1..22: mol_type = other RNA
aagcaattctcatgcctcagcc

SEQ ID NO: 21037 - RNA, 22 nt, synthetic construct
  source 1..22: mol_type = other RNA
tcatgcctcagcctcctgagta

SEQ ID NO: 21038 - RNA, 22 nt, synthetic construct
  source 1..22: mol_type = other RNA
atgtattttttagtagagatgg

SEQ ID NO: 21039 - RNA, 22 nt, synthetic construct
  source 1..22: mol_type = other RNA
tttagtagagatggggtttcac

SEQ ID NO: 21040 - RNA, 22 nt, synthetic construct
  source 1..22: mol_type = other RNA
ttagtagagatggggtttcacc

SEQ ID NO: 21041 - RNA, 22 nt, synthetic construct
  source 1..22: mol_type = other RNA
tagtagagatggggtttcacca

SEQ ID NO: 21042 - RNA, 22 nt, synthetic construct
  source 1..22: mol_type = other RNA
agtagagatggggtttcaccat

SEQ ID NO: 21043 - RNA, 22 nt, synthetic construct
  source 1..22: mol_type = other RNA
gtagagatggggtttcaccatg

SEQ ID NO: 21044 - RNA, 22 nt, synthetic construct
  source 1..22: mol_type = other RNA
caccatgttggccaggctaaaa

SEQ ID NO: 21045 - RNA, 22 nt, synthetic construct
  source 1..22: mol_type = other RNA
accatgttggccaggctaaaat

SEQ ID NO: 21046 - RNA, 22 nt, synthetic construct
  source 1..22: mol_type = other RNA
gccaggctaaaatctcataacg

SEQ ID NO: 21047 - RNA, 22 nt, synthetic construct
  source 1..22: mol_type = other RNA
taagaaagtttatgaatctgtg

SEQ ID NO: 21048 - RNA, 22 nt, synthetic construct
  source 1..22: mol_type = other RNA
aagaaagtttatgaatctgtgt

SEQ ID NO: 21049 - RNA, 22 nt, synthetic construct
  source 1..22: mol_type = other RNA
agaaagtttatgaatctgtgtt

SEQ ID NO: 21050 - RNA, 22 nt, synthetic construct
  source 1..22: mol_type = other RNA
atgaatctgtgttgggccacag

SEQ ID NO: 21051 - RNA, 22 nt, synthetic construct
  source 1..22: mol_type = other RNA
tgaatctgtgttgggccacagt

SEQ ID NO: 21052 - RNA, 22 nt, synthetic construct
  source 1..22: mol_type = other RNA
ggccacagtcaaagccgtcctg

SEQ ID NO: 21053 - RNA, 22 nt, synthetic construct
  source 1..22: mol_type = other RNA
aacaagtttcttctaaggcatc

SEQ ID NO: 21054 - RNA, 22 nt, synthetic construct
  source 1..22: mol_type = other RNA
cttctaaggcatcaagagcccc

SEQ ID NO: 21055 - RNA, 22 nt, synthetic construct
  source 1..22: mol_type = other RNA
ttctaaggcatcaagagcccca

SEQ ID NO: 21056 - RNA, 22 nt, synthetic construct
  source 1..22: mol_type = other RNA
tccaaccttctgacatcatcag

SEQ ID NO: 21057 - RNA, 22 nt, synthetic construct
  source 1..22: mol_type = other RNA
tcagccactagatttttttccc

SEQ ID NO: 21058 - RNA, 22 nt, synthetic construct
  source 1..22: mol_type = other RNA
ttttccccctttctgaaactgt

SEQ ID NO: 21059 - RNA, 22 nt, synthetic construct
  source 1..22: mol_type = other RNA
tttccccctttctgaaactgta

SEQ ID NO: 21060 - RNA, 22 nt, synthetic construct
  source 1..22: mol_type = other RNA
ttccccctttctgaaactgtaa

SEQ ID NO: 21061 - RNA, 22 nt, synthetic construct
  source 1..22: mol_type = other RNA
tccccctttctgaaactgtaac

SEQ ID NO: 21062 - RNA, 22 nt, synthetic construct
  source 1..22: mol_type = other RNA
ccccctttctgaaactgtaacc

SEQ ID NO: 21063 - RNA, 22 nt, synthetic construct
  source 1..22: mol_type = other RNA
cccctttctgaaactgtaacct

SEQ ID NO: 21064 - RNA, 22 nt, synthetic construct
  source 1..22: mol_type = other RNA
tgaaactgtaacctttcattcc

SEQ ID NO: 21065 - RNA, 22 nt, synthetic construct
  source 1..22: mol_type = other RNA
attccagccattccccagagct

SEQ ID NO: 21066 - RNA, 22 nt, synthetic construct
  source 1..22: mol_type = other RNA
cagccattccccagagctggac

SEQ ID NO: 21067 - RNA, 22 nt, synthetic construct
  source 1..22: mol_type = other RNA
cccagagctggacagaggacgt

SEQ ID NO: 21068 - RNA, 22 nt, synthetic construct
  source 1..22: mol_type = other RNA
ctgtagtcagaatgacagttgg

SEQ ID NO: 21069 - RNA, 22 nt, synthetic construct
  source 1..22: mol_type = other RNA
tgtagtcagaatgacagttggg

SEQ ID NO: 21070 - RNA, 22 nt, synthetic construct
  source 1..22: mol_type = other RNA
ggtgctagatccccttcgtgaa

SEQ ID NO: 21071 - RNA, 22 nt, synthetic construct
  source 1..22: mol_type = other RNA
aggatgtggcttaagtaagaag

SEQ ID NO: 21072 - RNA, 22 nt, synthetic construct
  source 1..22: mol_type = other RNA
tacgcgcactggtgggtgaggc

SEQ ID NO: 21073 - RNA, 22 nt, synthetic construct
  source 1..22: mol_type = other RNA
acgcgcactggtgggtgaggct

SEQ ID NO: 21074 - RNA, 22 nt, synthetic construct
  source 1..22: mol_type = other RNA
cgcgcactggtgggtgaggctc

SEQ ID NO: 21075 - RNA, 22 nt, synthetic construct
  source 1..22: mol_type = other RNA
tttcctagagttcagctgcccg

SEQ ID NO: 21076 - RNA, 22 nt, synthetic construct
  source 1..22: mol_type = other RNA
ctagagttcagctgcccgctgt

SEQ ID NO: 21077 - RNA, 22 nt, synthetic construct
  source 1..22: mol_type = other RNA
agctgcccgctgtcctgctcct

SEQ ID NO: 21078 - RNA, 22 nt, synthetic construct
  source 1..22: mol_type = other RNA
agcctgtctgtgctgattgtgg

SEQ ID NO: 21079 - RNA, 22 nt, synthetic construct
  source 1..22: mol_type = other RNA
gcctgtctgtgctgattgtggt

SEQ ID NO: 21080 - RNA, 22 nt, synthetic construct
  source 1..22: mol_type = other RNA
tggttctgccccttcctggctg

SEQ ID NO: 21081 - RNA, 22 nt, synthetic construct
  source 1..22: mol_type = other RNA
tgccccttcctggctgtgtgac

SEQ ID NO: 21082 - RNA, 22 nt, synthetic construct
  source 1..22: mol_type = other RNA
cctcatctggaaaaggggacag

SEQ ID NO: 21083 - RNA, 22 nt, synthetic construct
  source 1..22: mol_type = other RNA
ctcatctggaaaaggggacagt

SEQ ID NO: 21084 - RNA, 22 nt, synthetic construct
  source 1..22: mol_type = other RNA
ggctgtttgtgtccatggagtg

SEQ ID NO: 21085 - RNA, 22 nt, synthetic construct
  source 1..22: mol_type = other RNA
gtgtccatggagtgcctgacaa

SEQ ID NO: 21086 - RNA, 22 nt, synthetic construct
  source 1..22: mol_type = other RNA
tgtccatggagtgcctgacaat

SEQ ID NO: 21087 - RNA, 22 nt, synthetic construct
  source 1..22: mol_type = other RNA
cttccctccttagccccacctg

SEQ ID NO: 21088 - RNA, 22 nt, synthetic construct
  source 1..22: mol_type = other RNA
ccaggtagaaaccaataccggc

SEQ ID NO: 21089 - RNA, 22 nt, synthetic construct
  source 1..22: mol_type = other RNA
cctccttcaaagaccttgcctt

SEQ ID NO: 21090 - RNA, 22 nt, synthetic construct
  source 1..22: mol_type = other RNA
ctccttcaaagaccttgccttc

SEQ ID NO: 21091 - RNA, 22 nt, synthetic construct
  source 1..22: mol_type = other RNA
ctcattcctttctccatgtacc

SEQ ID NO: 21092 - RNA, 22 nt, synthetic construct
  source 1..22: mol_type = other RNA
ctttctccatgtaccaaaaaat

SEQ ID NO: 21093 - RNA, 22 nt, synthetic construct
  source 1..22: mol_type = other RNA
tccatgtaccaaaaaatcaatt

SEQ ID NO: 21094 - RNA, 22 nt, synthetic construct
  source 1..22: mol_type = other RNA
aagtggctaaagacagacgtca

SEQ ID NO: 21095 - RNA, 22 nt, synthetic construct
  source 1..22: mol_type = other RNA
tgatcctccacgctggtgacag

SEQ ID NO: 21096 - RNA, 22 nt, synthetic construct
  source 1..22: mol_type = other RNA
tcaaacctggcttcggatttgc

SEQ ID NO: 21097 - RNA, 22 nt, synthetic construct
  source 1..22: mol_type = other RNA
gcacgttggctgccaaagctga

SEQ ID NO: 21098 - RNA, 22 nt, synthetic construct
  source 1..22: mol_type = other RNA
cacgttggctgccaaagctgat

SEQ ID NO: 21099 - RNA, 22 nt, synthetic construct
  source 1..22: mol_type = other RNA
gctgccaaagctgatcagcagc

SEQ ID NO: 21100 - RNA, 22 nt, synthetic construct
  source 1..22: mol_type = other RNA
tgaagatgcctggtctaccacg

SEQ ID NO: 21101 - RNA, 22 nt, synthetic construct
  source 1..22: mol_type = other RNA
tttacttagtattttaaaccaa

SEQ ID NO: 21102 - RNA, 22 nt, synthetic construct
  source 1..22: mol_type = other RNA
acttagtattttaaaccaatgt

SEQ ID NO: 21103 - RNA, 22 nt, synthetic construct
  source 1..22: mol_type = other RNA
cttagtattttaaaccaatgta

SEQ ID NO: 21104 - RNA, 22 nt, synthetic construct
  source 1..22: mol_type = other RNA
taaaccaatgtactttttaaac

SEQ ID NO: 21105 - RNA, 22 nt, synthetic construct
  source 1..22: mol_type = other RNA
aaaccaatgtactttttaaact

SEQ ID NO: 21106 - RNA, 22 nt, synthetic construct
  source 1..22: mol_type = other RNA
aaccaatgtactttttaaactc

SEQ ID NO: 21107 - RNA, 22 nt, synthetic construct
  source 1..22: mol_type = other RNA
taaactccaattttttaataag

SEQ ID NO: 21108 - RNA, 22 nt, synthetic construct
  source 1..22: mol_type = other RNA
aaactccaattttttaataaga

SEQ ID NO: 21109 - RNA, 22 nt, synthetic construct
  source 1..22: mol_type = other RNA
aactccaattttttaataagat

SEQ ID NO: 21110 - RNA, 22 nt, synthetic construct
  source 1..22: mol_type = other RNA
tttaataagatcatttatgtca

SEQ ID NO: 21111 - RNA, 22 nt, synthetic construct
  source 1..22: mol_type = other RNA
ttaataagatcatttatgtcac

SEQ ID NO: 21112 - RNA, 22 nt, synthetic construct
  source 1..22: mol_type = other RNA
taataagatcatttatgtcacc

SEQ ID NO: 21113 - RNA, 22 nt, synthetic construct
  source 1..22: mol_type = other RNA
aataagatcatttatgtcacca

SEQ ID NO: 21114 - RNA, 22 nt, synthetic construct
  source 1..22: mol_type = other RNA
ataagatcatttatgtcaccat

SEQ ID NO: 21115 - RNA, 22 nt, synthetic construct
  source 1..22: mol_type = other RNA
atgtcaccatataacacccaaa

SEQ ID NO: 21116 - RNA, 22 nt, synthetic construct
  source 1..22: mol_type = other RNA
tgtcaccatataacacccaaag

SEQ ID NO: 21117 - RNA, 22 nt, synthetic construct
  source 1..22: mol_type = other RNA
gtcatacacagaaggcaatgct

SEQ ID NO: 21118 - RNA, 22 nt, synthetic construct
  source 1..22: mol_type = other RNA
tcatacacagaaggcaatgcta

SEQ ID NO: 21119 - RNA, 22 nt, synthetic construct
  source 1..22: mol_type = other RNA
aaagggcaaagcagtaggtgct

SEQ ID NO: 21120 - RNA, 22 nt, synthetic construct
  source 1..22: mol_type = other RNA
actaccgccctgggacgcctcc

SEQ ID NO: 21121 - RNA, 22 nt, synthetic construct
  source 1..22: mol_type = other RNA
cctccctggtctaatggaaccc

SEQ ID NO: 21122 - RNA, 22 nt, synthetic construct
  source 1..22: mol_type = other RNA
ctccctggtctaatggaaccct

SEQ ID NO: 21123 - RNA, 22 nt, synthetic construct
  source 1..22: mol_type = other RNA
tttttaaccacccagccaagcc

SEQ ID NO: 21124 - RNA, 22 nt, synthetic construct
  source 1..22: mol_type = other RNA
ttaaccacccagccaagcccct

SEQ ID NO: 21125 - RNA, 22 nt, synthetic construct
  source 1..22: mol_type = other RNA
taaccacccagccaagcccctt

SEQ ID NO: 21126 - RNA, 22 nt, synthetic construct
  source 1..22: mol_type = other RNA
aaccacccagccaagccccttg

SEQ ID NO: 21127 - RNA, 22 nt, synthetic construct
  source 1..22: mol_type = other RNA
accacccagccaagccccttgc

SEQ ID NO: 21128 - RNA, 22 nt, synthetic construct
  source 1..22: mol_type = other RNA
cccgccactccaagcttggggc

SEQ ID NO: 21129 - RNA, 22 nt, synthetic construct
  source 1..22: mol_type = other RNA
tcaccgcccttgggctacttca

SEQ ID NO: 21130 - RNA, 22 nt, synthetic construct
  source 1..22: mol_type = other RNA
acactgaccacgtcattcatta

SEQ ID NO: 21131 - RNA, 22 nt, synthetic construct
  source 1..22: mol_type = other RNA
attaagcaagcaccaactatac

SEQ ID NO: 21132 - RNA, 22 nt, synthetic construct
  source 1..22: mol_type = other RNA
agcaagcaccaactatacatca

SEQ ID NO: 21133 - RNA, 22 nt, synthetic construct
  source 1..22: mol_type = other RNA
actatcccaatctaatttgcac

SEQ ID NO: 21134 - RNA, 22 nt, synthetic construct
  source 1..22: mol_type = other RNA
gcacaagcccttaggcaggtgc

SEQ ID NO: 21135 - RNA, 22 nt, synthetic construct
  source 1..22: mol_type = other RNA
cacaagcccttaggcaggtgct

SEQ ID NO: 21136 - RNA, 22 nt, synthetic construct
  source 1..22: mol_type = other RNA
tccctgttttacagagaaggaa

SEQ ID NO: 21137 - RNA, 22 nt, synthetic construct
  source 1..22: mol_type = other RNA
tacagagaaggaaaccgaggct

SEQ ID NO: 21138 - RNA, 22 nt, synthetic construct
  source 1..22: mol_type = other RNA
acagagaaggaaaccgaggctt

SEQ ID NO: 21139 - RNA, 22 nt, synthetic construct
  source 1..22: mol_type = other RNA
cagagaaggaaaccgaggctta

SEQ ID NO: 21140 - RNA, 22 nt, synthetic construct
  source 1..22: mol_type = other RNA
gtggagctgggatttaaaccaa

SEQ ID NO: 21141 - RNA, 22 nt, synthetic construct
  source 1..22: mol_type = other RNA
aaaccaaaatatgtccaactgc

SEQ ID NO: 21142 - RNA, 22 nt, synthetic construct
  source 1..22: mol_type = other RNA
aaccaaaatatgtccaactgca

SEQ ID NO: 21143 - RNA, 22 nt, synthetic construct
  source 1..22: mol_type = other RNA
tagagggtatacggaggtgacc

SEQ ID NO: 21144 - RNA, 22 nt, synthetic construct
  source 1..22: mol_type = other RNA
agagggtatacggaggtgaccc

SEQ ID NO: 21145 - RNA, 22 nt, synthetic construct
  source 1..22: mol_type = other RNA
gagggtatacggaggtgaccct

SEQ ID NO: 21146 - RNA, 22 nt, synthetic construct
  source 1..22: mol_type = other RNA
gcttttcagtttttggtcaatc

SEQ ID NO: 21147 - RNA, 22 nt, synthetic construct
  source 1..22: mol_type = other RNA
cttttcagtttttggtcaatcc

SEQ ID NO: 21148 - RNA, 22 nt, synthetic construct
  source 1..22: mol_type = other RNA
cagtttttggtcaatccttatg

SEQ ID NO: 21149 - RNA, 22 nt, synthetic construct
  source 1..22: mol_type = other RNA
agtttttggtcaatccttatga

SEQ ID NO: 21150 - RNA, 22 nt, synthetic construct
  source 1..22: mol_type = other RNA
ttggtcaatccttatgattatt

SEQ ID NO: 21151 - RNA, 22 nt, synthetic construct
  source 1..22: mol_type = other RNA
tggtcaatccttatgattattt

SEQ ID NO: 21152 - RNA, 22 nt, synthetic construct
  source 1..22: mol_type = other RNA
ggtcaatccttatgattattta

SEQ ID NO: 21153 - RNA, 22 nt, synthetic construct
  source 1..22: mol_type = other RNA
gtcaatccttatgattatttag

SEQ ID NO: 21154 - RNA, 22 nt, synthetic construct
  source 1..22: mol_type = other RNA
tttagaggagaaagttcagttt

SEQ ID NO: 21155 - RNA, 22 nt, synthetic construct
  source 1..22: mol_type = other RNA
agaggagaaagttcagtttggt

SEQ ID NO: 21156 - RNA, 22 nt, synthetic construct
  source 1..22: mol_type = other RNA
gaggagaaagttcagtttggtg

SEQ ID NO: 21157 - RNA, 22 nt, synthetic construct
  source 1..22: mol_type = other RNA
agtttggtgctggtatatctta

SEQ ID NO: 21158 - RNA, 22 nt, synthetic construct
  source 1..22: mol_type = other RNA
ggtgctggtatatcttatgttt

SEQ ID NO: 21159 - RNA, 22 nt, synthetic construct
  source 1..22: mol_type = other RNA
gtgctggtatatcttatgttta

SEQ ID NO: 21160 - RNA, 22 nt, synthetic construct
  source 1..22: mol_type = other RNA
atcacccgacagttgttaatct

SEQ ID NO: 21161 - RNA, 22 nt, synthetic construct
  source 1..22: mol_type = other RNA
tcacccgacagttgttaatctc

SEQ ID NO: 21162 - RNA, 22 nt, synthetic construct
  source 1..22: mol_type = other RNA
ttaatctctttttaacaaagaa

SEQ ID NO: 21163 - RNA, 22 nt, synthetic construct
  source 1..22: mol_type = other RNA
atctctttttaacaaagaatac

SEQ ID NO: 21164 - RNA, 22 nt, synthetic construct
  source 1..22: mol_type = other RNA
taacaaagaatacaggccaagg

SEQ ID NO: 21165 - RNA, 22 nt, synthetic construct
  source 1..22: mol_type = other RNA
aacaaagaatacaggccaaggc

SEQ ID NO: 21166 - RNA, 22 nt, synthetic construct
  source 1..22: mol_type = other RNA
acaaagaatacaggccaaggcc

SEQ ID NO: 21167 - RNA, 22 nt, synthetic construct
  source 1..22: mol_type = other RNA
gctggctttggtatttggccaa

SEQ ID NO: 21168 - RNA, 22 nt, synthetic construct
  source 1..22: mol_type = other RNA
gtatttggccaaaagttaatga

SEQ ID NO: 21169 - RNA, 22 nt, synthetic construct
  source 1..22: mol_type = other RNA
ggccaaaagttaatgactttgg

SEQ ID NO: 21170 - RNA, 22 nt, synthetic construct
  source 1..22: mol_type = other RNA
gccaaaagttaatgactttggc

SEQ ID NO: 21171 - RNA, 22 nt, synthetic construct
  source 1..22: mol_type = other RNA
atgactttggcagttagtgttt

SEQ ID NO: 21172 - RNA, 22 nt, synthetic construct
  source 1..22: mol_type = other RNA
gcagttagtgtttttatccatg

SEQ ID NO: 21173 - RNA, 22 nt, synthetic construct
  source 1..22: mol_type = other RNA
gtgtttttatccatgccaagcg

SEQ ID NO: 21174 - RNA, 22 nt, synthetic construct
  source 1..22: mol_type = other RNA
ttatccatgccaagcgatgatg

SEQ ID NO: 21175 - RNA, 22 nt, synthetic construct
  source 1..22: mol_type = other RNA
tatccatgccaagcgatgatga

SEQ ID NO: 21176 - RNA, 22 nt, synthetic construct
  source 1..22: mol_type = other RNA
atccatgccaagcgatgatgat

SEQ ID NO: 21177 - RNA, 22 nt, synthetic construct
  source 1..22: mol_type = other RNA
tccatgccaagcgatgatgatt

SEQ ID NO: 21178 - RNA, 22 nt, synthetic construct
  source 1..22: mol_type = other RNA
tctctttagtgacagacatttt

SEQ ID NO: 21179 - RNA, 22 nt, synthetic construct
  source 1..22: mol_type = other RNA
ctctttagtgacagacattttt

SEQ ID NO: 21180 - RNA, 22 nt, synthetic construct
  source 1..22: mol_type = other RNA
tctttagtgacagacatttttt

SEQ ID NO: 21181 - RNA, 22 nt, synthetic construct
  source 1..22: mol_type = other RNA
gtgacagacattttttaaaaaa

SEQ ID NO: 21182 - RNA, 22 nt, synthetic construct
  source 1..22: mol_type = other RNA
tttaaaaaataaattcacataa

SEQ ID NO: 21183 - RNA, 22 nt, synthetic construct
  source 1..22: mol_type = other RNA
ttaaaaaataaattcacataaa

SEQ ID NO: 21184 - RNA, 22 nt, synthetic construct
  source 1..22: mol_type = other RNA
taaaaaataaattcacataaaa

SEQ ID NO: 21185 - RNA, 22 nt, synthetic construct
  source 1..22: mol_type = other RNA
aaaaaataaattcacataaaaa

SEQ ID NO: 21186 - RNA, 22 nt, synthetic construct
  source 1..22: mol_type = other RNA
aaaaataaattcacataaaaaa

SEQ ID NO: 21187 - RNA, 22 nt, synthetic construct
  source 1..22: mol_type = other RNA
acataaaaaagtagttttacag

SEQ ID NO: 21188 - RNA, 22 nt, synthetic construct
  source 1..22: mol_type = other RNA
tacagatgaagcactaaaacta

SEQ ID NO: 21189 - RNA, 22 nt, synthetic construct
  source 1..22: mol_type = other RNA
acagatgaagcactaaaactag

SEQ ID NO: 21190 - RNA, 22 nt, synthetic construct
  source 1..22: mol_type = other RNA
cagatgaagcactaaaactagt

SEQ ID NO: 21191 - RNA, 22 nt, synthetic construct
  source 1..22: mol_type = other RNA
catcttaaactgcaaattataa

SEQ ID NO: 21192 - RNA, 22 nt, synthetic construct
  source 1..22: mol_type = other RNA
atcttaaactgcaaattataaa

SEQ ID NO: 21193 - RNA, 22 nt, synthetic construct
  source 1..22: mol_type = other RNA
taaagggaataatagtaacttg

SEQ ID NO: 21194 - RNA, 22 nt, synthetic construct
  source 1..22: mol_type = other RNA
acatcgccagaaaggggacaga

SEQ ID NO: 21195 - RNA, 22 nt, synthetic construct
  source 1..22: mol_type = other RNA
ctgccaagaatgcctcatctga

SEQ ID NO: 21196 - RNA, 22 nt, synthetic construct
  source 1..22: mol_type = other RNA
agagacagtttacaaaacacca

SEQ ID NO: 21197 - RNA, 22 nt, synthetic construct
  source 1..22: mol_type = other RNA
acaaaacaccagccttgtactc

SEQ ID NO: 21198 - RNA, 22 nt, synthetic construct
  source 1..22: mol_type = other RNA
caaaacaccagccttgtactct

SEQ ID NO: 21199 - RNA, 22 nt, synthetic construct
  source 1..22: mol_type = other RNA
atgcaaaagctgatctgggatt

SEQ ID NO: 21200 - RNA, 22 nt, synthetic construct
  source 1..22: mol_type = other RNA
catcttggacctcaactctccc

SEQ ID NO: 21201 - RNA, 22 nt, synthetic construct
  source 1..22: mol_type = other RNA
tattgttaagggacactactgg

SEQ ID NO: 21202 - RNA, 22 nt, synthetic construct
  source 1..22: mol_type = other RNA
attgttaagggacactactggg

SEQ ID NO: 21203 - RNA, 22 nt, synthetic construct
  source 1..22: mol_type = other RNA
ttgttaagggacactactggga

SEQ ID NO: 21204 - RNA, 22 nt, synthetic construct
  source 1..22: mol_type = other RNA
ttaagggacactactgggacaa

SEQ ID NO: 21205 - RNA, 22 nt, synthetic construct
  source 1..22: mol_type = other RNA
agggacactactgggacaattt

SEQ ID NO: 21206 - RNA, 22 nt, synthetic construct
  source 1..22: mol_type = other RNA
tttttttttttcgttttgagac

SEQ ID NO: 21207 - RNA, 22 nt, synthetic construct
  source 1..22: mol_type = other RNA
ttttttttttcgttttgagaca

SEQ ID NO: 21208 - RNA, 22 nt, synthetic construct
  source 1..22: mol_type = other RNA
tttttttttcgttttgagacag

SEQ ID NO: 21209 - RNA, 22 nt, synthetic construct
  source 1..22: mol_type = other RNA
ttttttttcgttttgagacagg

SEQ ID NO: 21210 - RNA, 22 nt, synthetic construct
  source 1..22: mol_type = other RNA
tttttttcgttttgagacaggg

SEQ ID NO: 21211 - RNA, 22 nt, synthetic construct
  source 1..22: mol_type = other RNA
ttttttcgttttgagacagggt

SEQ ID NO: 21212 - RNA, 22 nt, synthetic construct
  source 1..22: mol_type = other RNA
tttttcgttttgagacagggtc

SEQ ID NO: 21213 - RNA, 22 nt, synthetic construct
  source 1..22: mol_type = other RNA
ttttcgttttgagacagggtct

SEQ ID NO: 21214 - RNA, 22 nt, synthetic construct
  source 1..22: mol_type = other RNA
tttcgttttgagacagggtctc

SEQ ID NO: 21215 - RNA, 22 nt, synthetic construct
  source 1..22: mol_type = other RNA
ttcgttttgagacagggtctcg

SEQ ID NO: 21216 - RNA, 22 nt, synthetic construct
  source 1..22: mol_type = other RNA
tcgttttgagacagggtctcgc

SEQ ID NO: 21217 - RNA, 22 nt, synthetic construct
  source 1..22: mol_type = other RNA
cgttttgagacagggtctcgct

SEQ ID NO: 21218 - RNA, 22 nt, synthetic construct
  source 1..22: mol_type = other RNA
gttttgagacagggtctcgctc

SEQ ID NO: 21219 - RNA, 22 nt, synthetic construct
  source 1..22: mol_type = other RNA
tgagacagggtctcgctcagtc

SEQ ID NO: 21220 - RNA, 22 nt, synthetic construct
  source 1..22: mol_type = other RNA
gagacagggtctcgctcagtca

SEQ ID NO: 21221 - RNA, 22 nt, synthetic construct
  source 1..22: mol_type = other RNA
agacagggtctcgctcagtcac

SEQ ID NO: 21222 - RNA, 22 nt, synthetic construct
  source 1..22: mol_type = other RNA
tttttttcctactttttgtaga

SEQ ID NO: 21223 - RNA, 22 nt, synthetic construct
  source 1..22: mol_type = other RNA
ttttttcctactttttgtagag

SEQ ID NO: 21224 - RNA, 22 nt, synthetic construct
  source 1..22: mol_type = other RNA
tttttcctactttttgtagaga

SEQ ID NO: 21225 - RNA, 22 nt, synthetic construct
  source 1..22: mol_type = other RNA
ttttcctactttttgtagagac

SEQ ID NO: 21226 - RNA, 22 nt, synthetic construct
  source 1..22: mol_type = other RNA
tttcctactttttgtagagacg

SEQ ID NO: 21227 - RNA, 22 nt, synthetic construct
  source 1..22: mol_type = other RNA
ttcctactttttgtagagacgg

SEQ ID NO: 21228 - RNA, 22 nt, synthetic construct
  source 1..22: mol_type = other RNA
tcctactttttgtagagacggg

SEQ ID NO: 21229 - RNA, 22 nt, synthetic construct
  source 1..22: mol_type = other RNA
cctactttttgtagagacgggg

SEQ ID NO: 21230 - RNA, 22 nt, synthetic construct
  source 1..22: mol_type = other RNA
ctactttttgtagagacggggt

SEQ ID NO: 21231 - RNA, 22 nt, synthetic construct
  source 1..22: mol_type = other RNA
tgtagagacggggtctcactat

SEQ ID NO: 21232 - RNA, 22 nt, synthetic construct
  source 1..22: mol_type = other RNA
gtagagacggggtctcactatg

SEQ ID NO: 21233 - RNA, 22 nt, synthetic construct
  source 1..22: mol_type = other RNA
tagagacggggtctcactatgt

SEQ ID NO: 21234 - RNA, 22 nt, synthetic construct
  source 1..22: mol_type = other RNA
cccaggctggtttcaaactcaa

SEQ ID NO: 21235 - RNA, 22 nt, synthetic construct
  source 1..22: mol_type = other RNA
caaactcaagtgatccttccac

SEQ ID NO: 21236 - RNA, 22 nt, synthetic construct
  source 1..22: mol_type = other RNA
aaactcaagtgatccttccacc

SEQ ID NO: 21237 - RNA, 22 nt, synthetic construct
  source 1..22: mol_type = other RNA
gaataaagttgtagatgagatt

SEQ ID NO: 21238 - RNA, 22 nt, synthetic construct
  source 1..22: mol_type = other RNA
aataaagttgtagatgagattg

SEQ ID NO: 21239 - RNA, 22 nt, synthetic construct
  source 1..22: mol_type = other RNA
tagatgagattggtcataggat

SEQ ID NO: 21240 - RNA, 22 nt, synthetic construct
  source 1..22: mol_type = other RNA
gtcataggattgtatagtgtat

SEQ ID NO: 21241 - RNA, 22 nt, synthetic construct
  source 1..22: mol_type = other RNA
tatagtgtatcaatattagatt

SEQ ID NO: 21242 - RNA, 22 nt, synthetic construct
  source 1..22: mol_type = other RNA
gatttgctgattttgacaaccc

SEQ ID NO: 21243 - RNA, 22 nt, synthetic construct
  source 1..22: mol_type = other RNA
gctgattttgacaaccctactg

SEQ ID NO: 21244 - RNA, 22 nt, synthetic construct
  source 1..22: mol_type = other RNA
ctgattttgacaaccctactgt

SEQ ID NO: 21245 - RNA, 22 nt, synthetic construct
  source 1..22: mol_type = other RNA
tgacaaccctactgtggttatg

SEQ ID NO: 21246 - RNA, 22 nt, synthetic construct
  source 1..22: mol_type = other RNA
gacaaccctactgtggttatgc

SEQ ID NO: 21247 - RNA, 22 nt, synthetic construct
  source 1..22: mol_type = other RNA
acaaccctactgtggttatgca

SEQ ID NO: 21248 - RNA, 22 nt, synthetic construct
  source 1..22: mol_type = other RNA
tgcaaatttgtccttgttctaa

SEQ ID NO: 21249 - RNA, 22 nt, synthetic construct
  source 1..22: mol_type = other RNA
gtccttgttctaaggaaataaa

SEQ ID NO: 21250 - RNA, 22 nt, synthetic construct
  source 1..22: mol_type = other RNA
tccttgttctaaggaaataaat

SEQ ID NO: 21251 - RNA, 22 nt, synthetic construct
  source 1..22: mol_type = other RNA
taaggaaataaatactgaatta

SEQ ID NO: 21252 - RNA, 22 nt, synthetic construct
  source 1..22: mol_type = other RNA
tttaggagtaaaggtgcataat

SEQ ID NO: 21253 - RNA, 22 nt, synthetic construct
  source 1..22: mol_type = other RNA
aggagtaaaggtgcataatgaa

SEQ ID NO: 21254 - RNA, 22 nt, synthetic construct
  source 1..22: mol_type = other RNA
ggagtaaaggtgcataatgaac

SEQ ID NO: 21255 - RNA, 22 nt, synthetic construct
  source 1..22: mol_type = other RNA
tcaaatgcttatgaaaattaca

SEQ ID NO: 21256 - RNA, 22 nt, synthetic construct
  source 1..22: mol_type = other RNA
caaatgcttatgaaaattacac

SEQ ID NO: 21257 - RNA, 22 nt, synthetic construct
  source 1..22: mol_type = other RNA
aaatgcttatgaaaattacaca

SEQ ID NO: 21258 - RNA, 22 nt, synthetic construct
  source 1..22: mol_type = other RNA
cacatatacacatgtgtgcata

SEQ ID NO: 21259 - RNA, 22 nt, synthetic construct
  source 1..22: mol_type = other RNA
gggcgggcattgtttgtgctct

SEQ ID NO: 21260 - RNA, 22 nt, synthetic construct
  source 1..22: mol_type = other RNA
ggcgggcattgtttgtgctctt

SEQ ID NO: 21261 - RNA, 22 nt, synthetic construct
  source 1..22: mol_type = other RNA
tttgtgctcttgcaacttttct

SEQ ID NO: 21262 - RNA, 22 nt, synthetic construct
  source 1..22: mol_type = other RNA
gtgctcttgcaacttttctgta

SEQ ID NO: 21263 - RNA, 22 nt, synthetic construct
  source 1..22: mol_type = other RNA
tgctcttgcaacttttctgtaa

SEQ ID NO: 21264 - RNA, 22 nt, synthetic construct
  source 1..22: mol_type = other RNA
ctgtaagtgtgaaattacttca

SEQ ID NO: 21265 - RNA, 22 nt, synthetic construct
  source 1..22: mol_type = other RNA
tgtaagtgtgaaattacttcat

SEQ ID NO: 21266 - RNA, 22 nt, synthetic construct
  source 1..22: mol_type = other RNA
cttcataacagaggtttttgtt

SEQ ID NO: 21267 - RNA, 22 nt, synthetic construct
  source 1..22: mol_type = other RNA
ttgtttgtttgtttgtttttaa

SEQ ID NO: 21268 - RNA, 22 nt, synthetic construct
  source 1..22: mol_type = other RNA
tgtttgtttgtttgtttttaat

SEQ ID NO: 21269 - RNA, 22 nt, synthetic construct
  source 1..22: mol_type = other RNA
gtttgtttgtttgtttttaatt

SEQ ID NO: 21270 - RNA, 22 nt, synthetic construct
  source 1..22: mol_type = other RNA
tttgtttgtttgtttttaattc

SEQ ID NO: 21271 - RNA, 22 nt, synthetic construct
  source 1..22: mol_type = other RNA
gtttgtttgtttttaattcagg

SEQ ID NO: 21272 - RNA, 22 nt, synthetic construct
  source 1..22: mol_type = other RNA
tttgtttgtttttaattcagga

SEQ ID NO: 21273 - RNA, 22 nt, synthetic construct
  source 1..22: mol_type = other RNA
gtttgtttttaattcaggaaaa

SEQ ID NO: 21274 - RNA, 22 nt, synthetic construct
  source 1..22: mol_type = other RNA
tttgtttttaattcaggaaaaa

SEQ ID NO: 21275 - RNA, 22 nt, synthetic construct
  source 1..22: mol_type = other RNA
gtttttaattcaggaaaaagtt

SEQ ID NO: 21276 - RNA, 22 nt, synthetic construct
  source 1..22: mol_type = other RNA
tttttaattcaggaaaaagttg

SEQ ID NO: 21277 - RNA, 22 nt, synthetic construct
  source 1..22: mol_type = other RNA
ttaattcaggaaaaagttggaa

SEQ ID NO: 21278 - RNA, 22 nt, synthetic construct
  source 1..22: mol_type = other RNA
taattcaggaaaaagttggaag

SEQ ID NO: 21279 - RNA, 22 nt, synthetic construct
  source 1..22: mol_type = other RNA
aattcaggaaaaagttggaaga

SEQ ID NO: 21280 - RNA, 22 nt, synthetic construct
  source 1..22: mol_type = other RNA
attcaggaaaaagttggaagag

SEQ ID NO: 21281 - RNA, 22 nt, synthetic construct
  source 1..22: mol_type = other RNA
aggaaaaagttggaagagtgcg

SEQ ID NO: 21282 - RNA, 22 nt, synthetic construct
  source 1..22: mol_type = other RNA
gaagagtgcgtatgaaataggc

SEQ ID NO: 21283 - RNA, 22 nt, synthetic construct
  source 1..22: mol_type = other RNA
caaggtcggggatggggagccc

SEQ ID NO: 21284 - RNA, 22 nt, synthetic construct
  source 1..22: mol_type = other RNA
gctttgttccctcggcctccac

SEQ ID NO: 21285 - RNA, 22 nt, synthetic construct
  source 1..22: mol_type = other RNA
ttccctcggcctccacttcccc

SEQ ID NO: 21286 - RNA, 22 nt, synthetic construct
  source 1..22: mol_type = other RNA
cctcggcctccacttccccatt

SEQ ID NO: 21287 - RNA, 22 nt, synthetic construct
  source 1..22: mol_type = other RNA
tgtgcctccatttatttgtgag

SEQ ID NO: 21288 - RNA, 22 nt, synthetic construct
  source 1..22: mol_type = other RNA
atttgtgagacagggataaaga

SEQ ID NO: 21289 - RNA, 22 nt, synthetic construct
  source 1..22: mol_type = other RNA
tttgtgagacagggataaagag

SEQ ID NO: 21290 - RNA, 22 nt, synthetic construct
  source 1..22: mol_type = other RNA
gtgagacagggataaagaggtc

SEQ ID NO: 21291 - RNA, 22 nt, synthetic construct
  source 1..22: mol_type = other RNA
tgagacagggataaagaggtct

SEQ ID NO: 21292 - RNA, 22 nt, synthetic construct
  source 1..22: mol_type = other RNA
attgtgatcttaggtttcccaa

SEQ ID NO: 21293 - RNA, 22 nt, synthetic construct
  source 1..22: mol_type = other RNA
ttgtgatcttaggtttcccaaa

SEQ ID NO: 21294 - RNA, 22 nt, synthetic construct
  source 1..22: mol_type = other RNA
tgatcttaggtttcccaaaagc

SEQ ID NO: 21295 - RNA, 22 nt, synthetic construct
  source 1..22: mol_type = other RNA
cccaaaagccgagtatgctttc

SEQ ID NO: 21296 - RNA, 22 nt, synthetic construct
  source 1..22: mol_type = other RNA
ccaaaagccgagtatgctttca

SEQ ID NO: 21297 - RNA, 22 nt, synthetic construct
  source 1..22: mol_type = other RNA
agaagttctgggaggaaagcta

SEQ ID NO: 21298 - RNA, 22 nt, synthetic construct
  source 1..22: mol_type = other RNA
tgggaggaaagctagcagataa

SEQ ID NO: 21299 - RNA, 22 nt, synthetic construct
  source 1..22: mol_type = other RNA
agagaagccctcactttcttag

SEQ ID NO: 21300 - RNA, 22 nt, synthetic construct
  source 1..22: mol_type = other RNA
ttagttcggcaaaacagacaca

SEQ ID NO: 21301 - RNA, 22 nt, synthetic construct
  source 1..22: mol_type = other RNA
ggcaaaacagacacatgagctg

SEQ ID NO: 21302 - RNA, 22 nt, synthetic construct
  source 1..22: mol_type = other RNA
cttggctgaaatctccagtttg

SEQ ID NO: 21303 - RNA, 22 nt, synthetic construct
  source 1..22: mol_type = other RNA
ttggctgaaatctccagtttgt

SEQ ID NO: 21304 - RNA, 22 nt, synthetic construct
  source 1..22: mol_type = other RNA
gtataattcagggctaagagag

SEQ ID NO: 21305 - RNA, 22 nt, synthetic construct
  source 1..22: mol_type = other RNA
tataattcagggctaagagagc

SEQ ID NO: 21306 - RNA, 22 nt, synthetic construct
  source 1..22: mol_type = other RNA
agggctaagagagcaggactct

SEQ ID NO: 21307 - RNA, 22 nt, synthetic construct
  source 1..22: mol_type = other RNA
tctcctgtctgaagacgcagct

SEQ ID NO: 21308 - RNA, 22 nt, synthetic construct
  source 1..22: mol_type = other RNA
ctcctgtctgaagacgcagctg

SEQ ID NO: 21309 - RNA, 22 nt, synthetic construct
  source 1..22: mol_type = other RNA
tcctgtctgaagacgcagctgg

SEQ ID NO: 21310 - RNA, 22 nt, synthetic construct
  source 1..22: mol_type = other RNA
tctgtctcttgcttagatgaca

SEQ ID NO: 21311 - RNA, 22 nt, synthetic construct
  source 1..22: mol_type = other RNA
cctgcatccgccctgacccctg

SEQ ID NO: 21312 - RNA, 22 nt, synthetic construct
  source 1..22: mol_type = other RNA
ctgcatccgccctgacccctgg

SEQ ID NO: 21313 - RNA, 22 nt, synthetic construct
  source 1..22: mol_type = other RNA
gggtttctgacctgggcagctc

SEQ ID NO: 21314 - RNA, 22 nt, synthetic construct
  source 1..22: mol_type = other RNA
ggtttctgacctgggcagctct

SEQ ID NO: 21315 - RNA, 22 nt, synthetic construct
  source 1..22: mol_type = other RNA
ctgacctgggcagctctatgtc

SEQ ID NO: 21316 - RNA, 22 nt, synthetic construct
  source 1..22: mol_type = other RNA
tgacctgggcagctctatgtcc

SEQ ID NO: 21317 - RNA, 22 nt, synthetic construct
  source 1..22: mol_type = other RNA
tgctgatagcacaggccacaga

SEQ ID NO: 21318 - RNA, 22 nt, synthetic construct
  source 1..22: mol_type = other RNA
gcaaggagggaccaggttagga

SEQ ID NO: 21319 - RNA, 22 nt, synthetic construct
  source 1..22: mol_type = other RNA
ggaaggagcagctgtggttcct

SEQ ID NO: 21320 - RNA, 22 nt, synthetic construct
  source 1..22: mol_type = other RNA
ctagttgggagataactgaagc

SEQ ID NO: 21321 - RNA, 22 nt, synthetic construct
  source 1..22: mol_type = other RNA
ggagataactgaagcctaggaa

SEQ ID NO: 21322 - RNA, 22 nt, synthetic construct
  source 1..22: mol_type = other RNA
tccagtctctgcattttcagct

SEQ ID NO: 21323 - RNA, 22 nt, synthetic construct
  source 1..22: mol_type = other RNA
tcagctcgctgtgtgccaagag

SEQ ID NO: 21324 - RNA, 22 nt, synthetic construct
  source 1..22: mol_type = other RNA
cagctcgctgtgtgccaagaga

SEQ ID NO: 21325 - RNA, 22 nt, synthetic construct
  source 1..22: mol_type = other RNA
agctcgctgtgtgccaagagag

SEQ ID NO: 21326 - RNA, 22 nt, synthetic construct
  source 1..22: mol_type = other RNA
actttcattaggaaccgggacg

SEQ ID NO: 21327 - RNA, 22 nt, synthetic construct
  source 1..22: mol_type = other RNA
attaggaaccgggacgaataat

SEQ ID NO: 21328 - RNA, 22 nt, synthetic construct
  source 1..22: mol_type = other RNA
ggaaccgggacgaataatccaa

SEQ ID NO: 21329 - RNA, 22 nt, synthetic construct
  source 1..22: mol_type = other RNA
tcctgggaaggagggagctccc

SEQ ID NO: 21330 - RNA, 22 nt, synthetic construct
  source 1..22: mol_type = other RNA
cccattccctgctcctgggcaa

SEQ ID NO: 21331 - RNA, 22 nt, synthetic construct
  source 1..22: mol_type = other RNA
cctgctcctgggcaacaattaa

SEQ ID NO: 21332 - RNA, 22 nt, synthetic construct
  source 1..22: mol_type = other RNA
acactctaggaaaaccacagag

SEQ ID NO: 21333 - RNA, 22 nt, synthetic construct
  source 1..22: mol_type = other RNA
tggtgccctggggaccacaggg

SEQ ID NO: 21334 - RNA, 22 nt, synthetic construct
  source 1..22: mol_type = other RNA
tcctaagggtcctggggctggg

SEQ ID NO: 21335 - RNA, 22 nt, synthetic construct
  source 1..22: mol_type = other RNA
atgcatgagtataggtgcaggt

SEQ ID NO: 21336 - RNA, 22 nt, synthetic construct
  source 1..22: mol_type = other RNA
gtacatttgcaagggcatgggt

SEQ ID NO: 21337 - RNA, 22 nt, synthetic construct
  source 1..22: mol_type = other RNA
tacatttgcaagggcatgggta

SEQ ID NO: 21338 - RNA, 22 nt, synthetic construct
  source 1..22: mol_type = other RNA
gcaagggcatgggtataacacg

SEQ ID NO: 21339 - RNA, 22 nt, synthetic construct
  source 1..22: mol_type = other RNA
caagggcatgggtataacacgc

SEQ ID NO: 21340 - RNA, 22 nt, synthetic construct
  source 1..22: mol_type = other RNA
cattgtatccgactatgaatat

SEQ ID NO: 21341 - RNA, 22 nt, synthetic construct
  source 1..22: mol_type = other RNA
tatccgactatgaatatgagtg

SEQ ID NO: 21342 - RNA, 22 nt, synthetic construct
  source 1..22: mol_type = other RNA
atattaatacatctcttactat

SEQ ID NO: 21343 - RNA, 22 nt, synthetic construct
  source 1..22: mol_type = other RNA
atacatctcttactatatacaa

SEQ ID NO: 21344 - RNA, 22 nt, synthetic construct
  source 1..22: mol_type = other RNA
tgtatatctcacctaatcctca

SEQ ID NO: 21345 - RNA, 22 nt, synthetic construct
  source 1..22: mol_type = other RNA
tcattatttccatcttctagaa

SEQ ID NO: 21346 - RNA, 22 nt, synthetic construct
  source 1..22: mol_type = other RNA
cattatttccatcttctagaag

SEQ ID NO: 21347 - RNA, 22 nt, synthetic construct
  source 1..22: mol_type = other RNA
attatttccatcttctagaaga

SEQ ID NO: 21348 - RNA, 22 nt, synthetic construct
  source 1..22: mol_type = other RNA
tttccatcttctagaagaggaa

SEQ ID NO: 21349 - RNA, 22 nt, synthetic construct
  source 1..22: mol_type = other RNA
ccatcttctagaagaggaaacc

SEQ ID NO: 21350 - RNA, 22 nt, synthetic construct
  source 1..22: mol_type = other RNA
catcttctagaagaggaaacca

SEQ ID NO: 21351 - RNA, 22 nt, synthetic construct
  source 1..22: mol_type = other RNA
agcagcatgcccaaggtcacag

SEQ ID NO: 21352 - RNA, 22 nt, synthetic construct
  source 1..22: mol_type = other RNA
gaggaactgaattatgtgggtc

SEQ ID NO: 21353 - RNA, 22 nt, synthetic construct
  source 1..22: mol_type = other RNA
aggaactgaattatgtgggtcc

SEQ ID NO: 21354 - RNA, 22 nt, synthetic construct
  source 1..22: mol_type = other RNA
tgtgggtccacacataagagaa

SEQ ID NO: 21355 - RNA, 22 nt, synthetic construct
  source 1..22: mol_type = other RNA
atcttgagattcatcctgggcc

SEQ ID NO: 21356 - RNA, 22 nt, synthetic construct
  source 1..22: mol_type = other RNA
atcctgggccccactgtgtgac

SEQ ID NO: 21357 - RNA, 22 nt, synthetic construct
  source 1..22: mol_type = other RNA
cctggattggcgtgtggggaac

SEQ ID NO: 21358 - RNA, 22 nt, synthetic construct
  source 1..22: mol_type = other RNA
ctggattggcgtgtggggaaca

SEQ ID NO: 21359 - RNA, 22 nt, synthetic construct
  source 1..22: mol_type = other RNA
gcgtgtggggaacacatgtgac

SEQ ID NO: 21360 - RNA, 22 nt, synthetic construct
  source 1..22: mol_type = other RNA
ccctgcttatggaaaggggcct

SEQ ID NO: 21361 - RNA, 22 nt, synthetic construct
  source 1..22: mol_type = other RNA
ctggcggcttccctgctgctag

SEQ ID NO: 21362 - RNA, 22 nt, synthetic construct
  source 1..22: mol_type = other RNA
tgagcttcctcggcacttgggg

SEQ ID NO: 21363 - RNA, 22 nt, synthetic construct
  source 1..22: mol_type = other RNA
gagggtggggaggagggaaggc

SEQ ID NO: 21364 - RNA, 22 nt, synthetic construct
  source 1..22: mol_type = other RNA
agggtggggaggagggaaggct

SEQ ID NO: 21365 - RNA, 22 nt, synthetic construct
  source 1..22: mol_type = other RNA
caagggtgtccctgagagatat

SEQ ID NO: 21366 - RNA, 22 nt, synthetic construct
  source 1..22: mol_type = other RNA
cctggtgtttctgcttaaacag

SEQ ID NO: 21367 - RNA, 22 nt, synthetic construct
  source 1..22: mol_type = other RNA
ctggtgtttctgcttaaacagc

SEQ ID NO: 21368 - RNA, 22 nt, synthetic construct
  source 1..22: mol_type = other RNA
ctgcttaaacagcgtttgctgc

SEQ ID NO: 21369 - RNA, 22 nt, synthetic construct
  source 1..22: mol_type = other RNA
tgcttaaacagcgtttgctgca

SEQ ID NO: 21370 - RNA, 22 nt, synthetic construct
  source 1..22: mol_type = other RNA
gctgcaaaatatgtcgaagcat

SEQ ID NO: 21371 - RNA, 22 nt, synthetic construct
  source 1..22: mol_type = other RNA
ctgcaaaatatgtcgaagcatt

SEQ ID NO: 21372 - RNA, 22 nt, synthetic construct
  source 1..22: mol_type = other RNA
gggattcagtttttagttcaga

SEQ ID NO: 21373 - RNA, 22 nt, synthetic construct
  source 1..22: mol_type = other RNA
ggattcagtttttagttcagaa

SEQ ID NO: 21374 - RNA, 22 nt, synthetic construct
  source 1..22: mol_type = other RNA
agtttttagttcagaatatgcc

SEQ ID NO: 21375 - RNA, 22 nt, synthetic construct
  source 1..22: mol_type = other RNA
ttagttcagaatatgccaatgt

SEQ ID NO: 21376 - RNA, 22 nt, synthetic construct
  source 1..22: mol_type = other RNA
tagttcagaatatgccaatgtt

SEQ ID NO: 21377 - RNA, 22 nt, synthetic construct
  source 1..22: mol_type = other RNA
agttcagaatatgccaatgttt

SEQ ID NO: 21378 - RNA, 22 nt, synthetic construct
  source 1..22: mol_type = other RNA
gttcagaatatgccaatgtttt

SEQ ID NO: 21379 - RNA, 22 nt, synthetic construct
  source 1..22: mol_type = other RNA
agaatatgccaatgttttcatt

SEQ ID NO: 21380 - RNA, 22 nt, synthetic construct
  source 1..22: mol_type = other RNA
tcatttggaaggggaagtgttt

SEQ ID NO: 21381 - RNA, 22 nt, synthetic construct
  source 1..22: mol_type = other RNA
catttggaaggggaagtgtttc

SEQ ID NO: 21382 - RNA, 22 nt, synthetic construct
  source 1..22: mol_type = other RNA
atttggaaggggaagtgtttct

SEQ ID NO: 21383 - RNA, 22 nt, synthetic construct
  source 1..22: mol_type = other RNA
ggaaggggaagtgtttctgttg

SEQ ID NO: 21384 - RNA, 22 nt, synthetic construct
  source 1..22: mol_type = other RNA
gaaggggaagtgtttctgttga

SEQ ID NO: 21385 - RNA, 22 nt, synthetic construct
  source 1..22: mol_type = other RNA
ctgttgatgtggtaaagagata

SEQ ID NO: 21386 - RNA, 22 nt, synthetic construct
  source 1..22: mol_type = other RNA
tgttgatgtggtaaagagataa

SEQ ID NO: 21387 - RNA, 22 nt, synthetic construct
  source 1..22: mol_type = other RNA
atgtggtaaagagataaaataa

SEQ ID NO: 21388 - RNA, 22 nt, synthetic construct
  source 1..22: mol_type = other RNA
ctcaccaagttacactgcttca

SEQ ID NO: 21389 - RNA, 22 nt, synthetic construct
  source 1..22: mol_type = other RNA
cactgcttcaaagtcaaatgct

SEQ ID NO: 21390 - RNA, 22 nt, synthetic construct
  source 1..22: mol_type = other RNA
atcttgggatcgcaggccctta

SEQ ID NO: 21391 - RNA, 22 nt, synthetic construct
  source 1..22: mol_type = other RNA
tcttgggatcgcaggcccttag

SEQ ID NO: 21392 - RNA, 22 nt, synthetic construct
  source 1..22: mol_type = other RNA
aatgagtgagtgcatatgcaaa

SEQ ID NO: 21393 - RNA, 22 nt, synthetic construct
  source 1..22: mol_type = other RNA
tgaatggattccataggttcta

SEQ ID NO: 21394 - RNA, 22 nt, synthetic construct
  source 1..22: mol_type = other RNA
gaatggattccataggttctac

SEQ ID NO: 21395 - RNA, 22 nt, synthetic construct
  source 1..22: mol_type = other RNA
aatggattccataggttctact

SEQ ID NO: 21396 - RNA, 22 nt, synthetic construct
  source 1..22: mol_type = other RNA
cataggttctacttttgagagt

SEQ ID NO: 21397 - RNA, 22 nt, synthetic construct
  source 1..22: mol_type = other RNA
tacttttgagagttgttctcag

SEQ ID NO: 21398 - RNA, 22 nt, synthetic construct
  source 1..22: mol_type = other RNA
gagagttgttctcagtctgttc

SEQ ID NO: 21399 - RNA, 22 nt, synthetic construct
  source 1..22: mol_type = other RNA
agagttgttctcagtctgttca

SEQ ID NO: 21400 - RNA, 22 nt, synthetic construct
  source 1..22: mol_type = other RNA
ttctcagtctgttcatgtttct

SEQ ID NO: 21401 - RNA, 22 nt, synthetic construct
  source 1..22: mol_type = other RNA
tcagtctgttcatgtttctcta

SEQ ID NO: 21402 - RNA, 22 nt, synthetic construct
  source 1..22: mol_type = other RNA
atgtttctctatcttcactaaa

SEQ ID NO: 21403 - RNA, 22 nt, synthetic construct
  source 1..22: mol_type = other RNA
ctctatcttcactaaactcccc

SEQ ID NO: 21404 - RNA, 22 nt, synthetic construct
  source 1..22: mol_type = other RNA
tctatcttcactaaactcccct

SEQ ID NO: 21405 - RNA, 22 nt, synthetic construct
  source 1..22: mol_type = other RNA
tgtccacaattgccagagtcat

SEQ ID NO: 21406 - RNA, 22 nt, synthetic construct
  source 1..22: mol_type = other RNA
ccagagtcatttttgcaaaatg

SEQ ID NO: 21407 - RNA, 22 nt, synthetic construct
  source 1..22: mol_type = other RNA
ttgcaaaatgggaatgggattg

SEQ ID NO: 21408 - RNA, 22 nt, synthetic construct
  source 1..22: mol_type = other RNA
tgcaaaatgggaatgggattgt

SEQ ID NO: 21409 - RNA, 22 nt, synthetic construct
  source 1..22: mol_type = other RNA
gcaaaatgggaatgggattgtg

SEQ ID NO: 21410 - RNA, 22 nt, synthetic construct
  source 1..22: mol_type = other RNA
caaaatgggaatgggattgtgt

SEQ ID NO: 21411 - RNA, 22 nt, synthetic construct
  source 1..22: mol_type = other RNA
tgtcatctcctgcctagaacct

SEQ ID NO: 21412 - RNA, 22 nt, synthetic construct
  source 1..22: mol_type = other RNA
cactgctcttggctatggcctt

SEQ ID NO: 21413 - RNA, 22 nt, synthetic construct
  source 1..22: mol_type = other RNA
ctggggctgttctccagccaca

SEQ ID NO: 21414 - RNA, 22 nt, synthetic construct
  source 1..22: mol_type = other RNA
tccagccacatgggcctccttt

SEQ ID NO: 21415 - RNA, 22 nt, synthetic construct
  source 1..22: mol_type = other RNA
ggttgcggaaaaaccaactctc

SEQ ID NO: 21416 - RNA, 22 nt, synthetic construct
  source 1..22: mol_type = other RNA
gttgcggaaaaaccaactctct

SEQ ID NO: 21417 - RNA, 22 nt, synthetic construct
  source 1..22: mol_type = other RNA
cggaaaaaccaactctctctca

SEQ ID NO: 21418 - RNA, 22 nt, synthetic construct
  source 1..22: mol_type = other RNA
cctcagcctggactgcttttct

SEQ ID NO: 21419 - RNA, 22 nt, synthetic construct
  source 1..22: mol_type = other RNA
ctccagatccttctatcaaatt

SEQ ID NO: 21420 - RNA, 22 nt, synthetic construct
  source 1..22: mol_type = other RNA
tccagatccttctatcaaatta

SEQ ID NO: 21421 - RNA, 22 nt, synthetic construct
  source 1..22: mol_type = other RNA
aggctcagctcaaaagcatcat

SEQ ID NO: 21422 - RNA, 22 nt, synthetic construct
  source 1..22: mol_type = other RNA
tctgacccctcagctaaagcag

SEQ ID NO: 21423 - RNA, 22 nt, synthetic construct
  source 1..22: mol_type = other RNA
cacttctgtttcactccatgtc

SEQ ID NO: 21424 - RNA, 22 nt, synthetic construct
  source 1..22: mol_type = other RNA
acttctgtttcactccatgtct

SEQ ID NO: 21425 - RNA, 22 nt, synthetic construct
  source 1..22: mol_type = other RNA
cactccatgtctacacctacag

SEQ ID NO: 21426 - RNA, 22 nt, synthetic construct
  source 1..22: mol_type = other RNA
actccatgtctacacctacaga

SEQ ID NO: 21427 - RNA, 22 nt, synthetic construct
  source 1..22: mol_type = other RNA
taagtgttgaggacatggcagt

SEQ ID NO: 21428 - RNA, 22 nt, synthetic construct
  source 1..22: mol_type = other RNA
aagtgttgaggacatggcagtg

SEQ ID NO: 21429 - RNA, 22 nt, synthetic construct
  source 1..22: mol_type = other RNA
agtgttgaggacatggcagtga

SEQ ID NO: 21430 - RNA, 22 nt, synthetic construct
  source 1..22: mol_type = other RNA
aggacatggcagtgaacacaac

SEQ ID NO: 21431 - RNA, 22 nt, synthetic construct
  source 1..22: mol_type = other RNA
cgaaaaaatctgattctcttgt

SEQ ID NO: 21432 - RNA, 22 nt, synthetic construct
  source 1..22: mol_type = other RNA
tcttgtttgggttcctactagt

SEQ ID NO: 21433 - RNA, 22 nt, synthetic construct
  source 1..22: mol_type = other RNA
gggttcctactagtcttcctca

SEQ ID NO: 21434 - RNA, 22 nt, synthetic construct
  source 1..22: mol_type = other RNA
ggttcctactagtcttcctcac

SEQ ID NO: 21435 - RNA, 22 nt, synthetic construct
  source 1..22: mol_type = other RNA
ctactagtcttcctcaccaagt

SEQ ID NO: 21436 - RNA, 22 nt, synthetic construct
  source 1..22: mol_type = other RNA
actgtgttcaatcaccaggcac

SEQ ID NO: 21437 - RNA, 22 nt, synthetic construct
  source 1..22: mol_type = other RNA
aatcaccaggcactgtactgaa

SEQ ID NO: 21438 - RNA, 22 nt, synthetic construct
  source 1..22: mol_type = other RNA
attctgtaaaagaacggacgga

SEQ ID NO: 21439 - RNA, 22 nt, synthetic construct
  source 1..22: mol_type = other RNA
tgtaaaagaacggacggatgga

SEQ ID NO: 21440 - RNA, 22 nt, synthetic construct
  source 1..22: mol_type = other RNA
tcgctaagatgttactgagctc

SEQ ID NO: 21441 - RNA, 22 nt, synthetic construct
  source 1..22: mol_type = other RNA
ctgagctcaactgaagcttttt

SEQ ID NO: 21442 - RNA, 22 nt, synthetic construct
  source 1..22: mol_type = other RNA
tcttcaaagaaatctcactgtg

SEQ ID NO: 21443 - RNA, 22 nt, synthetic construct
  source 1..22: mol_type = other RNA
cttcaaagaaatctcactgtga

SEQ ID NO: 21444 - RNA, 22 nt, synthetic construct
  source 1..22: mol_type = other RNA
ttcaaagaaatctcactgtgaa

SEQ ID NO: 21445 - RNA, 22 nt, synthetic construct
  source 1..22: mol_type = other RNA
ggagagccctctgccgccagct

SEQ ID NO: 21446 - RNA, 22 nt, synthetic construct
  source 1..22: mol_type = other RNA
gtgtctcctcaaacttcatatg

SEQ ID NO: 21447 - RNA, 22 nt, synthetic construct
  source 1..22: mol_type = other RNA
tgtctcctcaaacttcatatgt

SEQ ID NO: 21448 - RNA, 22 nt, synthetic construct
  source 1..22: mol_type = other RNA
aaactctgatcccaaatgatgg

SEQ ID NO: 21449 - RNA, 22 nt, synthetic construct
  source 1..22: mol_type = other RNA
cggggtgcggccttagggaggt

SEQ ID NO: 21450 - RNA, 22 nt, synthetic construct
  source 1..22: mol_type = other RNA
ggtcacgaaggcagagccttca

SEQ ID NO: 21451 - RNA, 22 nt, synthetic construct
  source 1..22: mol_type = other RNA
atgcccttataagaacagtaag

SEQ ID NO: 21452 - RNA, 22 nt, synthetic construct
  source 1..22: mol_type = other RNA
aagtcccccagcctatggtgtt

SEQ ID NO: 21453 - RNA, 22 nt, synthetic construct
  source 1..22: mol_type = other RNA
agtcccccagcctatggtgttc

SEQ ID NO: 21454 - RNA, 22 nt, synthetic construct
  source 1..22: mol_type = other RNA
tgttatagcagactgaactaag

SEQ ID NO: 21455 - RNA, 22 nt, synthetic construct
  source 1..22: mol_type = other RNA
tagcagactgaactaagacacc

SEQ ID NO: 21456 - RNA, 22 nt, synthetic construct
  source 1..22: mol_type = other RNA
tcttggcaaagccaggtaatgc

SEQ ID NO: 21457 - RNA, 22 nt, synthetic construct
  source 1..22: mol_type = other RNA
gtgtccattttcctaaaggagc

SEQ ID NO: 21458 - RNA, 22 nt, synthetic construct
  source 1..22: mol_type = other RNA
tcctaaaggagcccttgcccac

SEQ ID NO: 21459 - RNA, 22 nt, synthetic construct
  source 1..22: mol_type = other RNA
cctaaaggagcccttgcccacc

SEQ ID NO: 21460 - RNA, 22 nt, synthetic construct
  source 1..22: mol_type = other RNA
ctaaaggagcccttgcccacca

SEQ ID NO: 21461 - RNA, 22 nt, synthetic construct
  source 1..22: mol_type = other RNA
ccacttagaccctgtgcccagt

SEQ ID NO: 21462 - RNA, 22 nt, synthetic construct
  source 1..22: mol_type = other RNA
ctgcctgccctgtgaccctcac

SEQ ID NO: 21463 - RNA, 22 nt, synthetic construct
  source 1..22: mol_type = other RNA
tctctaattgagtctagctgcc

SEQ ID NO: 21464 - RNA, 22 nt, synthetic construct
  source 1..22: mol_type = other RNA
agtctagctgcctctcttcctt

SEQ ID NO: 21465 - RNA, 22 nt, synthetic construct
  source 1..22: mol_type = other RNA
ccctacctctcacatacacagt

SEQ ID NO: 21466 - RNA, 22 nt, synthetic construct
  source 1..22: mol_type = other RNA
cctacctctcacatacacagtg

SEQ ID NO: 21467 - RNA, 22 nt, synthetic construct
  source 1..22: mol_type = other RNA
tgtgaagggagcctacaaaact

SEQ ID NO: 21468 - RNA, 22 nt, synthetic construct
  source 1..22: mol_type = other RNA
tgagctgcagaactgatgagct

SEQ ID NO: 21469 - RNA, 22 nt, synthetic construct
  source 1..22: mol_type = other RNA
cttgcgatttctcctctcacag

SEQ ID NO: 21470 - RNA, 22 nt, synthetic construct
  source 1..22: mol_type = other RNA
ctcctctcacagctttggccta

SEQ ID NO: 21471 - RNA, 22 nt, synthetic construct
  source 1..22: mol_type = other RNA
tcctctcacagctttggcctag

SEQ ID NO: 21472 - RNA, 22 nt, synthetic construct
  source 1..22: mol_type = other RNA
gcctagagcccctgcacttaat

SEQ ID NO: 21473 - RNA, 22 nt, synthetic construct
  source 1..22: mol_type = other RNA
gtgcctggctccctgtgtcttc

SEQ ID NO: 21474 - RNA, 22 nt, synthetic construct
  source 1..22: mol_type = other RNA
tccttctaggacaagcgagaat

SEQ ID NO: 21475 - RNA, 22 nt, synthetic construct
  source 1..22: mol_type = other RNA
gggagcgaaggctttttccata

SEQ ID NO: 21476 - RNA, 22 nt, synthetic construct
  source 1..22: mol_type = other RNA
ggagcgaaggctttttccataa

SEQ ID NO: 21477 - RNA, 22 nt, synthetic construct
  source 1..22: mol_type = other RNA
tccataagctttgggggtaagt

SEQ ID NO: 21478 - RNA, 22 nt, synthetic construct
  source 1..22: mol_type = other RNA
ccataagctttgggggtaagtc

SEQ ID NO: 21479 - RNA, 22 nt, synthetic construct
  source 1..22: mol_type = other RNA
cataagctttgggggtaagtca

SEQ ID NO: 21480 - RNA, 22 nt, synthetic construct
  source 1..22: mol_type = other RNA
ggggtaagtcacagagctaccc

SEQ ID NO: 21481 - RNA, 22 nt, synthetic construct
  source 1..22: mol_type = other RNA
caccagctgtcccctttgctgg

SEQ ID NO: 21482 - RNA, 22 nt, synthetic construct
  source 1..22: mol_type = other RNA
accagctgtcccctttgctgga

SEQ ID NO: 21483 - RNA, 22 nt, synthetic construct
  source 1..22: mol_type = other RNA
ctggaggaagctttccagccca

SEQ ID NO: 21484 - RNA, 22 nt, synthetic construct
  source 1..22: mol_type = other RNA
cagcccaaacgaagggcttaag

SEQ ID NO: 21485 - RNA, 22 nt, synthetic construct
  source 1..22: mol_type = other RNA
ctggcatccagttagacctgga

SEQ ID NO: 21486 - RNA, 22 nt, synthetic construct
  source 1..22: mol_type = other RNA
gacctggaggaggtgaacggag

SEQ ID NO: 21487 - RNA, 22 nt, synthetic construct
  source 1..22: mol_type = other RNA
ctccctctcccttgctagcgcc

SEQ ID NO: 21488 - RNA, 22 nt, synthetic construct
  source 1..22: mol_type = other RNA
agagagggcacttacaggcctc

SEQ ID NO: 21489 - RNA, 22 nt, synthetic construct
  source 1..22: mol_type = other RNA
cggatcgtgtagggaagagggg

SEQ ID NO: 21490 - RNA, 22 nt, synthetic construct
  source 1..22: mol_type = other RNA
aggacgatgtactccatgagga

SEQ ID NO: 21491 - RNA, 22 nt, synthetic construct
  source 1..22: mol_type = other RNA
acgaagaacaggcccacgtaga

SEQ ID NO: 21492 - RNA, 22 nt, synthetic construct
  source 1..22: mol_type = other RNA
cgccccgacccccgaaatgcgc

SEQ ID NO: 21493 - RNA, 22 nt, synthetic construct
  source 1..22: mol_type = other RNA
gcaggccgccccctgcacgcgc

SEQ ID NO: 21494 - RNA, 22 nt, synthetic construct
  source 1..22: mol_type = other RNA
gccggctcaacgcccgcgctga

SEQ ID NO: 21495 - RNA, 22 nt, synthetic construct
  source 1..22: mol_type = other RNA
gctccggccgccagggggcggg

SEQ ID NO: 21496 - RNA, 22 nt, synthetic construct
  source 1..22: mol_type = other RNA
ctttcctggttcgggtctgccc

SEQ ID NO: 21497 - RNA, 22 nt, synthetic construct
  source 1..22: mol_type = other RNA
ctggttcgggtctgccctcaga

SEQ ID NO: 21498 - RNA, 22 nt, synthetic construct
  source 1..22: mol_type = other RNA
gggtctgccctcagatctcaaa

SEQ ID NO: 21499 - RNA, 22 nt, synthetic construct
  source 1..22: mol_type = other RNA
gctctgcgtatcgaataggggg

SEQ ID NO: 21500 - RNA, 22 nt, synthetic construct
  source 1..22: mol_type = other RNA
aaacctagacataatgctaagg

SEQ ID NO: 21501 - RNA, 22 nt, synthetic construct
  source 1..22: mol_type = other RNA
ggactccgtttctcctttaaaa

SEQ ID NO: 21502 - RNA, 22 nt, synthetic construct
  source 1..22: mol_type = other RNA
ctcctttaaaaggaggcggggt

SEQ ID NO: 21503 - RNA, 22 nt, synthetic construct
  source 1..22: mol_type = other RNA
tcctttaaaaggaggcggggtc

SEQ ID NO: 21504 - RNA, 22 nt, synthetic construct
  source 1..22: mol_type = other RNA
aaaggaggcggggtcggggagg

SEQ ID NO: 21505 - RNA, 22 nt, synthetic construct
  source 1..22: mol_type = other RNA
ccctggaaattttggacattcc

SEQ ID NO: 21506 - RNA, 22 nt, synthetic construct
  source 1..22: mol_type = other RNA
tggacattcccaaagcgccaat

SEQ ID NO: 21507 - RNA, 22 nt, synthetic construct
  source 1..22: mol_type = other RNA
ggacattcccaaagcgccaatt

SEQ ID NO: 21508 - RNA, 22 nt, synthetic construct
  source 1..22: mol_type = other RNA
gacattcccaaagcgccaattt

SEQ ID NO: 21509 - RNA, 22 nt, synthetic construct
  source 1..22: mol_type = other RNA
ccaaagcgccaattttcatggt

SEQ ID NO: 21510 - RNA, 22 nt, synthetic construct
  source 1..22: mol_type = other RNA
tcatggtggagatccaccagtg

SEQ ID NO: 21511 - RNA, 22 nt, synthetic construct
  source 1..22: mol_type = other RNA
catggtggagatccaccagtgt

SEQ ID NO: 21512 - RNA, 22 nt, synthetic construct
  source 1..22: mol_type = other RNA
atggtggagatccaccagtgtc

SEQ ID NO: 21513 - RNA, 22 nt, synthetic construct
  source 1..22: mol_type = other RNA
ctggaaggtccgcccactacgg

SEQ ID NO: 21514 - RNA, 22 nt, synthetic construct
  source 1..22: mol_type = other RNA
aggaacacctgaataaagagat

SEQ ID NO: 21515 - RNA, 22 nt, synthetic construct
  source 1..22: mol_type = other RNA
cgaggtagttcagatcttcaac

SEQ ID NO: 21516 - RNA, 20 nt, synthetic construct
  source 1..20: mol_type = other RNA
gaatgcccgccagcgcgacg

SEQ ID NO: 21517 - RNA, 20 nt, synthetic construct
  source 1..20: mol_type = other RNA
cttcaggaatgcccgccagc

SEQ ID NO: 21518 - RNA, 20 nt, synthetic construct
  source 1..20: mol_type = other RNA
agcgccgaggttgggggagg

SEQ ID NO: 21519 - RNA, 20 nt, synthetic construct
  source 1..20: mol_type = other RNA
cgccgcgcctttgggacgag

SEQ ID NO: 21520 - RNA, 20 nt, synthetic construct
  source 1..20: mol_type = other RNA
ccaccggagcagctgggacc

SEQ ID NO: 21521 - RNA, 20 nt, synthetic construct
  source 1..20: mol_type = other RNA
tcaggggagctgtaaaacca

SEQ ID NO: 21522 - RNA, 20 nt, synthetic construct
  source 1..20: mol_type = other RNA
gggagctgtaaaaccattaa

SEQ ID NO: 21523 - RNA, 20 nt, synthetic construct
  source 1..20: mol_type = other RNA
attgttattttttaaaatga

SEQ ID NO: 21524 - RNA, 20 nt, synthetic construct
  source 1..20: mol_type = other RNA
aggcaatcatcattacatgt

SEQ ID NO: 21525 - RNA, 20 nt, synthetic construct
  source 1..20: mol_type = other RNA
aggaggaaaatagaccttca

SEQ ID NO: 21526 - RNA, 20 nt, synthetic construct
  source 1..20: mol_type = other RNA
ttaagttttggaagcttaaa

SEQ ID NO: 21527 - RNA, 20 nt, synthetic construct
  source 1..20: mol_type = other RNA
acaggctgggtttgaatttg

SEQ ID NO: 21528 - RNA, 20 nt, synthetic construct
  source 1..20: mol_type = other RNA
agcacagattcatcctgcct

SEQ ID NO: 21529 - RNA, 20 nt, synthetic construct
  source 1..20: mol_type = other RNA
ggatcagagcacagattcat

SEQ ID NO: 21530 - RNA, 20 nt, synthetic construct
  source 1..20: mol_type = other RNA
atgcaaagagctctcttagc

SEQ ID NO: 21531 - RNA, 20 nt, synthetic construct
  source 1..20: mol_type = other RNA
gtcttcattagattccccaa

SEQ ID NO: 21532 - RNA, 20 nt, synthetic construct
  source 1..20: mol_type = other RNA
ggtacatgatcactaaaagg

SEQ ID NO: 21533 - RNA, 20 nt, synthetic construct
  source 1..20: mol_type = other RNA
aaacagtactttccaaaatg

SEQ ID NO: 21534 - RNA, 20 nt, synthetic construct
  source 1..20: mol_type = other RNA
agaggggtctggcatataaa

SEQ ID NO: 21535 - RNA, 20 nt, synthetic construct
  source 1..20: mol_type = other RNA
cagaaataaagaggttttgt

SEQ ID NO: 21536 - RNA, 20 nt, synthetic construct
  source 1..20: mol_type = other RNA
cctgccttggcctcccaaag

SEQ ID NO: 21537 - RNA, 20 nt, synthetic construct
  source 1..20: mol_type = other RNA
tagagacgggatttcaccat

SEQ ID NO: 21538 - RNA, 20 nt, synthetic construct
  source 1..20: mol_type = other RNA
ctcactgcaacctccgcctc

SEQ ID NO: 21539 - RNA, 20 nt, synthetic construct
  source 1..20: mol_type = other RNA
ataataacatctgccacgta

SEQ ID NO: 21540 - RNA, 20 nt, synthetic construct
  source 1..20: mol_type = other RNA
atgggtgtagatcaaggcag

SEQ ID NO: 21541 - RNA, 20 nt, synthetic construct
  source 1..20: mol_type = other RNA
ttcataatagcccccatcaa

SEQ ID NO: 21542 - RNA, 20 nt, synthetic construct
  source 1..20: mol_type = other RNA
cactcatagcattccttaac

SEQ ID NO: 21543 - RNA, 20 nt, synthetic construct
  source 1..20: mol_type = other RNA
aagtccttgagagcctccag

SEQ ID NO: 21544 - RNA, 20 nt, synthetic construct
  source 1..20: mol_type = other RNA
gcaccaagtgtttacatttg

SEQ ID NO: 21545 - RNA, 20 nt, synthetic construct
  source 1..20: mol_type = other RNA
gtactccaaagattcaggtt

SEQ ID NO: 21546 - RNA, 20 nt, synthetic construct
  source 1..20: mol_type = other RNA
gtttactcacgtcatccagc

SEQ ID NO: 21547 - RNA, 20 nt, synthetic construct
  source 1..20: mol_type = other RNA
gaaatttgactttccattct

SEQ ID NO: 21548 - RNA, 20 nt, synthetic construct
  source 1..20: mol_type = other RNA
taagtcaacttcaatgtcgg

SEQ ID NO: 21549 - RNA, 20 nt, synthetic construct
  source 1..20: mol_type = other RNA
acttgtctttcagcaaggac

SEQ ID NO: 21550 - RNA, 20 nt, synthetic construct
  source 1..20: mol_type = other RNA
tgtagtacaagagatagaaa

SEQ ID NO: 21551 - RNA, 20 nt, synthetic construct
  source 1..20: mol_type = other RNA
caaggactggtctttctatc

SEQ ID NO: 21552 - RNA, 20 nt, synthetic construct
  source 1..20: mol_type = other RNA
tgggggtgaattcagtgtag

SEQ ID NO: 21553 - RNA, 20 nt, synthetic construct
  source 1..20: mol_type = other RNA
cagcttacaaaagaatgtaa

SEQ ID NO: 21554 - RNA, 20 nt, synthetic construct
  source 1..20: mol_type = other RNA
ggtagtatggccatagacct

SEQ ID NO: 21555 - RNA, 20 nt, synthetic construct
  source 1..20: mol_type = other RNA
atgggatgggactcattcag

SEQ ID NO: 21556 - RNA, 20 nt, synthetic construct
  source 1..20: mol_type = other RNA
caggtgccactaatctgatc

SEQ ID NO: 21557 - RNA, 20 nt, synthetic construct
  source 1..20: mol_type = other RNA
ggaatgttcttaaagatcag

SEQ ID NO: 21558 - RNA, 20 nt, synthetic construct
  source 1..20: mol_type = other RNA
tatctcagcaggtgccacta

SEQ ID NO: 21559 - RNA, 20 nt, synthetic construct
  source 1..20: mol_type = other RNA
attagtggcacctgctgaga

SEQ ID NO: 21560 - RNA, 20 nt, synthetic construct
  source 1..20: mol_type = other RNA
aaaccatgctgtgcatcagt

SEQ ID NO: 21561 - RNA, 20 nt, synthetic construct
  source 1..20: mol_type = other RNA
tgctaaatatacctgaagct

SEQ ID NO: 21562 - RNA, 20 nt, synthetic construct
  source 1..20: mol_type = other RNA
gtatatttagcactgaacga

SEQ ID NO: 21563 - RNA, 20 nt, synthetic construct
  source 1..20: mol_type = other RNA
ataccaatccagccagaaag

SEQ ID NO: 21564 - RNA, 20 nt, synthetic construct
  source 1..20: mol_type = other RNA
gacagtgaaacaaaaacatt

SEQ ID NO: 21565 - RNA, 20 nt, synthetic construct
  source 1..20: mol_type = other RNA
taatatggccatacctgggg

SEQ ID NO: 21566 - RNA, 20 nt, synthetic construct
  source 1..20: mol_type = other RNA
cagagatgtccaatgtggaa

SEQ ID NO: 21567 - RNA, 20 nt, synthetic construct
  source 1..20: mol_type = other RNA
acagaagagaggagttatac

SEQ ID NO: 21568 - RNA, 20 nt, synthetic construct
  source 1..20: mol_type = other RNA
catcaatgtaccctgggcag

SEQ ID NO: 21569 - RNA, 20 nt, synthetic construct
  source 1..20: mol_type = other RNA
gaaggtggatgatctgccca

SEQ ID NO: 21570 - RNA, 20 nt, synthetic construct
  source 1..20: mol_type = other RNA
gtcctggctctacaatttac

SEQ ID NO: 21571 - RNA, 20 nt, synthetic construct
  source 1..20: mol_type = other RNA
aacatgtccccgtcattaag

SEQ ID NO: 21572 - RNA, 20 nt, synthetic construct
  source 1..20: mol_type = other RNA
tacagtaacaggctgtacag

SEQ ID NO: 21573 - RNA, 20 nt, synthetic construct
  source 1..20: mol_type = other RNA
cattttttcttctaagattt

SEQ ID NO: 21574 - RNA, 20 nt, synthetic construct
  source 1..20: mol_type = other RNA
gtttgaagatgccgcatttg

SEQ ID NO: 21575 - RNA, 20 nt, synthetic construct
  source 1..20: mol_type = other RNA
atacatcaaacatggagaca

SEQ ID NO: 21576 - RNA, 20 nt, synthetic construct
  source 1..20: mol_type = other RNA
atttgaactcttcaatctct

SEQ ID NO: 21577 - RNA, 20 nt, synthetic construct
  source 1..20: mol_type = other RNA
attcctaatctggaaaatgt

SEQ ID NO: 21578 - RNA, 20 nt, synthetic construct
  source 1..20: mol_type = other RNA
tgattcacattttccagatt

SEQ ID NO: 21579 - RNA, 20 nt, synthetic construct
  source 1..20: mol_type = other RNA
atacttttgctccctcttag

SEQ ID NO: 21580 - RNA, 20 nt, synthetic construct
  source 1..20: mol_type = other RNA
gaccccttcttggacaccaa

SEQ ID NO: 21581 - RNA, 20 nt, synthetic construct
  source 1..20: mol_type = other RNA
taaagacacaaccatccctt

SEQ ID NO: 21582 - RNA, 20 nt, synthetic construct
  source 1..20: mol_type = other RNA
caaaccatggatcaaaaaca

SEQ ID NO: 21583 - RNA, 20 nt, synthetic construct
  source 1..20: mol_type = other RNA
ggcagctgccctggccagtg

SEQ ID NO: 21584 - RNA, 20 nt, synthetic construct
  source 1..20: mol_type = other RNA
gatggcctggaagttgttca

SEQ ID NO: 21585 - RNA, 20 nt, synthetic construct
  source 1..20: mol_type = other RNA
gtgagaatgctgctctccag

SEQ ID NO: 21586 - RNA, 20 nt, synthetic construct
  source 1..20: mol_type = other RNA
caggttgtccaagagggcct

SEQ ID NO: 21587 - RNA, 20 nt, synthetic construct
  source 1..20: mol_type = other RNA
cccagcctggtgcaggccct

SEQ ID NO: 21588 - RNA, 20 nt, synthetic construct
  source 1..20: mol_type = other RNA
gctcatggagcagagtgcag

SEQ ID NO: 21589 - RNA, 20 nt, synthetic construct
  source 1..20: mol_type = other RNA
agaggagggaaaatccttga

SEQ ID NO: 21590 - RNA, 20 nt, synthetic construct
  source 1..20: mol_type = other RNA
ggagtgaacccaagcaggca

SEQ ID NO: 21591 - RNA, 20 nt, synthetic construct
  source 1..20: mol_type = other RNA
ggctcagggagtgaacccaa

SEQ ID NO: 21592 - RNA, 20 nt, synthetic construct
  source 1..20: mol_type = other RNA
ctcctgccttcaaaggggtc

SEQ ID NO: 21593 - RNA, 20 nt, synthetic construct
  source 1..20: mol_type = other RNA
tgtgagtcaaaatgagagaa

SEQ ID NO: 21594 - RNA, 20 nt, synthetic construct
  source 1..20: mol_type = other RNA
gtgatccacctgccttggcc

SEQ ID NO: 21595 - RNA, 20 nt, synthetic construct
  source 1..20: mol_type = other RNA
ttcgacaccagcctggccaa

SEQ ID NO: 21596 - RNA, 20 nt, synthetic construct
  source 1..20: mol_type = other RNA
cctcctgagtagctgggact

SEQ ID NO: 21597 - RNA, 20 nt, synthetic construct
  source 1..20: mol_type = other RNA
gaggctgaggcaggagaatt

SEQ ID NO: 21598 - RNA, 20 nt, synthetic construct
  source 1..20: mol_type = other RNA
ctttttctctggctcctcct

SEQ ID NO: 21599 - RNA, 20 nt, synthetic construct
  source 1..20: mol_type = other RNA
cctccaccttccttcctctc

SEQ ID NO: 21600 - RNA, 20 nt, synthetic construct
  source 1..20: mol_type = other RNA
cctcccaactagctgggact

SEQ ID NO: 21601 - RNA, 20 nt, synthetic construct
  source 1..20: mol_type = other RNA
gggttcgcaagcagcctggt

SEQ ID NO: 21602 - RNA, 20 nt, synthetic construct
  source 1..20: mol_type = other RNA
aaggagatggaacaaacacc

SEQ ID NO: 21603 - RNA, 20 nt, synthetic construct
  source 1..20: mol_type = other RNA
ggcatcaaatgcattttggc

SEQ ID NO: 21604 - RNA, 20 nt, synthetic construct
  source 1..20: mol_type = other RNA
cccctcccaccccctctttc

SEQ ID NO: 21605 - RNA, 20 nt, synthetic construct
  source 1..20: mol_type = other RNA
aaataaatatattacctccc

SEQ ID NO: 21606 - RNA, 20 nt, synthetic construct
  source 1..20: mol_type = other RNA
aggggaagaaagaggacagg

SEQ ID NO: 21607 - RNA, 20 nt, synthetic construct
  source 1..20: mol_type = other RNA
tgccctttgtttacaaacca

SEQ ID NO: 21608 - RNA, 20 nt, synthetic construct
  source 1..20: mol_type = other RNA
agaaaaagctaaatctggac

SEQ ID NO: 21609 - RNA, 20 nt, synthetic construct
  source 1..20: mol_type = other RNA
ctccctgctctcatccccta

SEQ ID NO: 21610 - RNA, 20 nt, synthetic construct
  source 1..20: mol_type = other RNA
cacactgtctgcctcagaac

SEQ ID NO: 21611 - RNA, 20 nt, synthetic construct
  source 1..20: mol_type = other RNA
aacctttgcacatgccgttc

SEQ ID NO: 21612 - RNA, 20 nt, synthetic construct
  source 1..20: mol_type = other RNA
ggcaggcttcattgataagg

SEQ ID NO: 21613 - RNA, 20 nt, synthetic construct
  source 1..20: mol_type = other RNA
agtgtggagggaggagttgc

SEQ ID NO: 21614 - RNA, 20 nt, synthetic construct
  source 1..20: mol_type = other RNA
ctcactgcaacttccatctc

SEQ ID NO: 21615 - RNA, 20 nt, synthetic construct
  source 1..20: mol_type = other RNA
cctcccaaatagctgggatt

SEQ ID NO: 21616 - RNA, 20 nt, synthetic construct
  source 1..20: mol_type = other RNA
gagttcaagaccagcctggc

SEQ ID NO: 21617 - RNA, 20 nt, synthetic construct
  source 1..20: mol_type = other RNA
gccctgtgctaggtatttgg

SEQ ID NO: 21618 - RNA, 20 nt, synthetic construct
  source 1..20: mol_type = other RNA
tggatggatgcgttgatgag

SEQ ID NO: 21619 - RNA, 20 nt, synthetic construct
  source 1..20: mol_type = other RNA
tttactcattggtaaagtag

SEQ ID NO: 21620 - RNA, 20 nt, synthetic construct
  source 1..20: mol_type = other RNA
gtcatgaccagaggcaaatc

SEQ ID NO: 21621 - RNA, 20 nt, synthetic construct
  source 1..20: mol_type = other RNA
tttgaagactgccaccctat

SEQ ID NO: 21622 - RNA, 20 nt, synthetic construct
  source 1..20: mol_type = other RNA
gctggtttcagtttgaagac

SEQ ID NO: 21623 - RNA, 20 nt, synthetic construct
  source 1..20: mol_type = other RNA
aagtccccttcagatattgc

SEQ ID NO: 21624 - RNA, 20 nt, synthetic construct
  source 1..20: mol_type = other RNA
atattgcagtgccttaggtg

SEQ ID NO: 21625 - RNA, 20 nt, synthetic construct
  source 1..20: mol_type = other RNA
tgtagcacagagcgaaaccc

SEQ ID NO: 21626 - RNA, 20 nt, synthetic construct
  source 1..20: mol_type = other RNA
gtgcctcagtgggaagttaa

SEQ ID NO: 21627 - RNA, 20 nt, synthetic construct
  source 1..20: mol_type = other RNA
tgggaagttaaagcaaacat

SEQ ID NO: 21628 - RNA, 20 nt, synthetic construct
  source 1..20: mol_type = other RNA
atgttgtgacccactgttga

SEQ ID NO: 21629 - RNA, 20 nt, synthetic construct
  source 1..20: mol_type = other RNA
aggccaaagaagggggagct

SEQ ID NO: 21630 - RNA, 20 nt, synthetic construct
  source 1..20: mol_type = other RNA
atccagagctgtccagctgt

SEQ ID NO: 21631 - RNA, 20 nt, synthetic construct
  source 1..20: mol_type = other RNA
agatgaagaaactgagattc

SEQ ID NO: 21632 - RNA, 20 nt, synthetic construct
  source 1..20: mol_type = other RNA
tttcttcatctctgaaatgg

SEQ ID NO: 21633 - RNA, 20 nt, synthetic construct
  source 1..20: mol_type = other RNA
agtggtctgatatttataca

SEQ ID NO: 21634 - RNA, 20 nt, synthetic construct
  source 1..20: mol_type = other RNA
accactctgagtctaacagc

SEQ ID NO: 21635 - RNA, 20 nt, synthetic construct
  source 1..20: mol_type = other RNA
cactgcattttgcatggggt

SEQ ID NO: 21636 - RNA, 20 nt, synthetic construct
  source 1..20: mol_type = other RNA
gctgtctgaggacatggccc

SEQ ID NO: 21637 - RNA, 20 nt, synthetic construct
  source 1..20: mol_type = other RNA
acagcctgagtgcctgtcct

SEQ ID NO: 21638 - RNA, 20 nt, synthetic construct
  source 1..20: mol_type = other RNA
tttccccatctataaagtgg

SEQ ID NO: 21639 - RNA, 20 nt, synthetic construct
  source 1..20: mol_type = other RNA
tgactctgaatgctattatc

SEQ ID NO: 21640 - RNA, 20 nt, synthetic construct
  source 1..20: mol_type = other RNA
agtcactgatctaagggctc

SEQ ID NO: 21641 - RNA, 20 nt, synthetic construct
  source 1..20: mol_type = other RNA
ggacaccattcagtgtaagc

SEQ ID NO: 21642 - RNA, 20 nt, synthetic construct
  source 1..20: mol_type = other RNA
aaccagcttcctcttgcagg

SEQ ID NO: 21643 - RNA, 20 nt, synthetic construct
  source 1..20: mol_type = other RNA
acgccagcctcaaggctgag

SEQ ID NO: 21644 - RNA, 20 nt, synthetic construct
  source 1..20: mol_type = other RNA
ccttgaggctggcgtctgag

SEQ ID NO: 21645 - RNA, 20 nt, synthetic construct
  source 1..20: mol_type = other RNA
ctggccttgggtttgaccat

SEQ ID NO: 21646 - RNA, 20 nt, synthetic construct
  source 1..20: mol_type = other RNA
aggctgtagggcacccctgc

SEQ ID NO: 21647 - RNA, 20 nt, synthetic construct
  source 1..20: mol_type = other RNA
aggaatcaataaaatgtaag

SEQ ID NO: 21648 - RNA, 20 nt, synthetic construct
  source 1..20: mol_type = other RNA
aacaacaaaaacaaccaaca

SEQ ID NO: 21649 - RNA, 20 nt, synthetic construct
  source 1..20: mol_type = other RNA
ttctaggaatgacagaacaa

SEQ ID NO: 21650 - RNA, 20 nt, synthetic construct
  source 1..20: mol_type = other RNA
gcgacttcccagagggagcc

SEQ ID NO: 21651 - RNA, 20 nt, synthetic construct
  source 1..20: mol_type = other RNA
gaaaggaagcccagaaggtg

SEQ ID NO: 21652 - RNA, 20 nt, synthetic construct
  source 1..20: mol_type = other RNA
aacaggggctggttctcagg

SEQ ID NO: 21653 - RNA, 20 nt, synthetic construct
  source 1..20: mol_type = other RNA
ggagggggatgtgttggcga

SEQ ID NO: 21654 - RNA, 20 nt, synthetic construct
  source 1..20: mol_type = other RNA
gaaagttggagggcaggcag

SEQ ID NO: 21655 - RNA, 20 nt, synthetic construct
  source 1..20: mol_type = other RNA
ctcattataacctctgcctc

SEQ ID NO: 21656 - RNA, 20 nt, synthetic construct
  source 1..20: mol_type = other RNA
cctcccgagtagctaggatt

SEQ ID NO: 21657 - RNA, 20 nt, synthetic construct
  source 1..20: mol_type = other RNA
gagtttgagaccagcctggc

SEQ ID NO: 21658 - RNA, 20 nt, synthetic construct
  source 1..20: mol_type = other RNA
cttcccaaaatgctgggatt

SEQ ID NO: 21659 - RNA, 20 nt, synthetic construct
  source 1..20: mol_type = other RNA
ttaatccatttctctaccta

SEQ ID NO: 21660 - RNA, 20 nt, synthetic construct
  source 1..20: mol_type = other RNA
caggtccaggttctcataca

SEQ ID NO: 21661 - RNA, 20 nt, synthetic construct
  source 1..20: mol_type = other RNA
gagaaggaaagaaaggaggc

SEQ ID NO: 21662 - RNA, 20 nt, synthetic construct
  source 1..20: mol_type = other RNA
cctcccaagtagctgggact

SEQ ID NO: 21663 - RNA, 20 nt, synthetic construct
  source 1..20: mol_type = other RNA
gcgaggtgcagtggcacact

SEQ ID NO: 21664 - RNA, 20 nt, synthetic construct
  source 1..20: mol_type = other RNA
tcttgtgtaggtattggggt

SEQ ID NO: 21665 - RNA, 20 nt, synthetic construct
  source 1..20: mol_type = other RNA
gtctttaattttctgcactt

SEQ ID NO: 21666 - RNA, 20 nt, synthetic construct
  source 1..20: mol_type = other RNA
aggtagcagagatgatgctt

SEQ ID NO: 21667 - RNA, 20 nt, synthetic construct
  source 1..20: mol_type = other RNA
tcctacctttgcaccttggt

SEQ ID NO: 21668 - RNA, 20 nt, synthetic construct
  source 1..20: mol_type = other RNA
aaactagcatgccagcaacc

SEQ ID NO: 21669 - RNA, 20 nt, synthetic construct
  source 1..20: mol_type = other RNA
gagaggtgctgctgaagccg

SEQ ID NO: 21670 - RNA, 20 nt, synthetic construct
  source 1..20: mol_type = other RNA
atccctagggtaagaccggc

SEQ ID NO: 21671 - RNA, 20 nt, synthetic construct
  source 1..20: mol_type = other RNA
cagcacctctcctgacaggg

SEQ ID NO: 21672 - RNA, 20 nt, synthetic construct
  source 1..20: mol_type = other RNA
ttctctcctgagacgggacc

SEQ ID NO: 21673 - RNA, 20 nt, synthetic construct
  source 1..20: mol_type = other RNA
gagagaactgactttgtccc

SEQ ID NO: 21674 - RNA, 20 nt, synthetic construct
  source 1..20: mol_type = other RNA
agcgagactctatttcaaaa

SEQ ID NO: 21675 - RNA, 20 nt, synthetic construct
  source 1..20: mol_type = other RNA
cctcccaagtaactgggatt

SEQ ID NO: 21676 - RNA, 20 nt, synthetic construct
  source 1..20: mol_type = other RNA
gaattcgaaaccagcctggc

SEQ ID NO: 21677 - RNA, 20 nt, synthetic construct
  source 1..20: mol_type = other RNA
gtgatccgcccgcctcagtc

SEQ ID NO: 21678 - RNA, 20 nt, synthetic construct
  source 1..20: mol_type = other RNA
tctcctaaagtgttgagatt

SEQ ID NO: 21679 - RNA, 20 nt, synthetic construct
  source 1..20: mol_type = other RNA
aggcagaatgacaacctcta

SEQ ID NO: 21680 - RNA, 20 nt, synthetic construct
  source 1..20: mol_type = other RNA
tgctagaggttgtcattctg

SEQ ID NO: 21681 - RNA, 20 nt, synthetic construct
  source 1..20: mol_type = other RNA
ctgtggcaggtgagggtgtg

SEQ ID NO: 21682 - RNA, 20 nt, synthetic construct
  source 1..20: mol_type = other RNA
ctcctggctgggtaccactg

SEQ ID NO: 21683 - RNA, 20 nt, synthetic construct
  source 1..20: mol_type = other RNA
gtgccaaagtgcatcctctg

SEQ ID NO: 21684 - RNA, 20 nt, synthetic construct
  source 1..20: mol_type = other RNA
tcaaacacacagtttgacgg

SEQ ID NO: 21685 - RNA, 20 nt, synthetic construct
  source 1..20: mol_type = other RNA
agacctgcaccgacacaggc

SEQ ID NO: 21686 - RNA, 20 nt, synthetic construct
  source 1..20: mol_type = other RNA
gttcaggtcttgtggacaag

SEQ ID NO: 21687 - RNA, 20 nt, synthetic construct
  source 1..20: mol_type = other RNA
gtcttgtggacaagaactgg

SEQ ID NO: 21688 - RNA, 20 nt, synthetic construct
  source 1..20: mol_type = other RNA
taccaccttcctcatctaca

SEQ ID NO: 21689 - RNA, 20 nt, synthetic construct
  source 1..20: mol_type = other RNA
ggaagatgtagatgaggaag

SEQ ID NO: 21690 - RNA, 20 nt, synthetic construct
  source 1..20: mol_type = other RNA
accgatggccaaggcagctt

SEQ ID NO: 21691 - RNA, 20 nt, synthetic construct
  source 1..20: mol_type = other RNA
agacagctggttctgatgtc

SEQ ID NO: 21692 - RNA, 20 nt, synthetic construct
  source 1..20: mol_type = other RNA
aaccagctgtctctgagaac

SEQ ID NO: 21693 - RNA, 20 nt, synthetic construct
  source 1..20: mol_type = other RNA
ctgtcttgaggtcccatatg

SEQ ID NO: 21694 - RNA, 20 nt, synthetic construct
  source 1..20: mol_type = other RNA
aggcgcctctcccgtggcac

SEQ ID NO: 21695 - RNA, 20 nt, synthetic construct
  source 1..20: mol_type = other RNA
tctcaaaaaaaagaaaaaaa

SEQ ID NO: 21696 - RNA, 20 nt, synthetic construct
  source 1..20: mol_type = other RNA
tctcccgagtagcacacgca

SEQ ID NO: 21697 - RNA, 20 nt, synthetic construct
  source 1..20: mol_type = other RNA
gagttgaagaccagcctggc

SEQ ID NO: 21698 - RNA, 20 nt, synthetic construct
  source 1..20: mol_type = other RNA
cctcccaaaggactaggatt

SEQ ID NO: 21699 - RNA, 20 nt, synthetic construct
  source 1..20: mol_type = other RNA
aaattctaagaatgaccagg

SEQ ID NO: 21700 - RNA, 20 nt, synthetic construct
  source 1..20: mol_type = other RNA
catttcttatttgtcaattt

SEQ ID NO: 21701 - RNA, 20 nt, synthetic construct
  source 1..20: mol_type = other RNA
aagtccccgggtgaggagtg

SEQ ID NO: 21702 - RNA, 20 nt, synthetic construct
  source 1..20: mol_type = other RNA
tttccccatgtgtgaaatga

SEQ ID NO: 21703 - RNA, 20 nt, synthetic construct
  source 1..20: mol_type = other RNA
caaaaatgcatgaggcacac

SEQ ID NO: 21704 - RNA, 20 nt, synthetic construct
  source 1..20: mol_type = other RNA
taccaccttcatcatttttg

SEQ ID NO: 21705 - RNA, 20 nt, synthetic construct
  source 1..20: mol_type = other RNA
cctccagagtagctgggact

SEQ ID NO: 21706 - RNA, 20 nt, synthetic construct
  source 1..20: mol_type = other RNA
cctcccgagcagctgggatt

SEQ ID NO: 21707 - RNA, 20 nt, synthetic construct
  source 1..20: mol_type = other RNA
ttgaacccagaacccgggag

SEQ ID NO: 21708 - RNA, 20 nt, synthetic construct
  source 1..20: mol_type = other RNA
agccttctacagtcaacagt

SEQ ID NO: 21709 - RNA, 20 nt, synthetic construct
  source 1..20: mol_type = other RNA
cttggtgtgaacatgtcttt

SEQ ID NO: 21710 - RNA, 20 nt, synthetic construct
  source 1..20: mol_type = other RNA
tattatttagcatcactttg

SEQ ID NO: 21711 - RNA, 20 nt, synthetic construct
  source 1..20: mol_type = other RNA
atggtttggggtgacccgcc

SEQ ID NO: 21712 - RNA, 20 nt, synthetic construct
  source 1..20: mol_type = other RNA
ggcaatttggtgtgggagta

SEQ ID NO: 21713 - RNA, 20 nt, synthetic construct
  source 1..20: mol_type = other RNA
cttgtcttgaggcatctggg

SEQ ID NO: 21714 - RNA, 20 nt, synthetic construct
  source 1..20: mol_type = other RNA
aaatgatgatcacaatggaa

SEQ ID NO: 21715 - RNA, 20 nt, synthetic construct
  source 1..20: mol_type = other RNA
actgttgaaggttcccccaa

SEQ ID NO: 21716 - RNA, 20 nt, synthetic construct
  source 1..20: mol_type = other RNA
tccacagtaaggaagtgaaa

SEQ ID NO: 21717 - RNA, 20 nt, synthetic construct
  source 1..20: mol_type = other RNA
aggtgtggggagggcttaag

SEQ ID NO: 21718 - RNA, 20 nt, synthetic construct
  source 1..20: mol_type = other RNA
atttctgtttctgaacaccc

SEQ ID NO: 21719 - RNA, 20 nt, synthetic construct
  source 1..20: mol_type = other RNA
aaacagaaatctgaccgctt

SEQ ID NO: 21720 - RNA, 20 nt, synthetic construct
  source 1..20: mol_type = other RNA
aagcacacagcctcatcact

SEQ ID NO: 21721 - RNA, 20 nt, synthetic construct
  source 1..20: mol_type = other RNA
cttccccaaggatgccttcg

SEQ ID NO: 21722 - RNA, 20 nt, synthetic construct
  source 1..20: mol_type = other RNA
agccccaaggtaaaaaggcc

SEQ ID NO: 21723 - RNA, 20 nt, synthetic construct
  source 1..20: mol_type = other RNA
aatggtttctctgtttatct

SEQ ID NO: 21724 - RNA, 20 nt, synthetic construct
  source 1..20: mol_type = other RNA
ctggtcctgccattccagat

SEQ ID NO: 21725 - RNA, 20 nt, synthetic construct
  source 1..20: mol_type = other RNA
gtcagccaggtgtctggagt

SEQ ID NO: 21726 - RNA, 20 nt, synthetic construct
  source 1..20: mol_type = other RNA
ccaggtgtctggagtatgaa

SEQ ID NO: 21727 - RNA, 20 nt, synthetic construct
  source 1..20: mol_type = other RNA
caccgaaaggttctagaagt

SEQ ID NO: 21728 - RNA, 20 nt, synthetic construct
  source 1..20: mol_type = other RNA
actttcgggcagtgtgtcac

SEQ ID NO: 21729 - RNA, 20 nt, synthetic construct
  source 1..20: mol_type = other RNA
catgctggcctggctcggcc

SEQ ID NO: 21730 - RNA, 20 nt, synthetic construct
  source 1..20: mol_type = other RNA
tatttacccaaagggaggcg

SEQ ID NO: 21731 - RNA, 20 nt, synthetic construct
  source 1..20: mol_type = other RNA
ccttgaggtgtagctgttga

SEQ ID NO: 21732 - RNA, 20 nt, synthetic construct
  source 1..20: mol_type = other RNA
cagctggggagagctggcgg

SEQ ID NO: 21733 - RNA, 20 nt, synthetic construct
  source 1..20: mol_type = other RNA
gggacgggggaacagatggt

SEQ ID NO: 21734 - RNA, 20 nt, synthetic construct
  source 1..20: mol_type = other RNA
agccggtgccaggtgtctgc

SEQ ID NO: 21735 - RNA, 20 nt, synthetic construct
  source 1..20: mol_type = other RNA
gggcacacccttcccagcca

SEQ ID NO: 21736 - RNA, 20 nt, synthetic construct
  source 1..20: mol_type = other RNA
gggagtctgagaaaagggat

SEQ ID NO: 21737 - RNA, 20 nt, synthetic construct
  source 1..20: mol_type = other RNA
actcccctgaaatgtatggt

SEQ ID NO: 21738 - RNA, 20 nt, synthetic construct
  source 1..20: mol_type = other RNA
tctctgggttcaaagcaaac

SEQ ID NO: 21739 - RNA, 20 nt, synthetic construct
  source 1..20: mol_type = other RNA
aggtaaccttgccccctccc

SEQ ID NO: 21740 - RNA, 20 nt, synthetic construct
  source 1..20: mol_type = other RNA
gcctgaatttcctcatctgg

SEQ ID NO: 21741 - RNA, 20 nt, synthetic construct
  source 1..20: mol_type = other RNA
gcctgaaaagggaaagtgac

SEQ ID NO: 21742 - RNA, 20 nt, synthetic construct
  source 1..20: mol_type = other RNA
aggtcttggattcctgctgg

SEQ ID NO: 21743 - RNA, 20 nt, synthetic construct
  source 1..20: mol_type = other RNA
gtaccttccatggatggaaa

SEQ ID NO: 21744 - RNA, 20 nt, synthetic construct
  source 1..20: mol_type = other RNA
aggagtgaatagctcagtta

SEQ ID NO: 21745 - RNA, 20 nt, synthetic construct
  source 1..20: mol_type = other RNA
ttagctcatctcaggggcca

SEQ ID NO: 21746 - RNA, 20 nt, synthetic construct
  source 1..20: mol_type = other RNA
gggccatgtgccctcggagg

SEQ ID NO: 21747 - RNA, 20 nt, synthetic construct
  source 1..20: mol_type = other RNA
tccaaccgtgaaagtggcaa

SEQ ID NO: 21748 - RNA, 20 nt, synthetic construct
  source 1..20: mol_type = other RNA
gacttgcagatcacttgccc

SEQ ID NO: 21749 - RNA, 20 nt, synthetic construct
  source 1..20: mol_type = other RNA
aagtggcatcccaactgcct

SEQ ID NO: 21750 - RNA, 20 nt, synthetic construct
  source 1..20: mol_type = other RNA
cgctgcagaaagaaagtgaa

SEQ ID NO: 21751 - RNA, 20 nt, synthetic construct
  source 1..20: mol_type = other RNA
cccgaccttaggggttacag

SEQ ID NO: 21752 - RNA, 20 nt, synthetic construct
  source 1..20: mol_type = other RNA
ctacttgctcaaggtcacac

SEQ ID NO: 21753 - RNA, 20 nt, synthetic construct
  source 1..20: mol_type = other RNA
ggaacggcggccctggtcca

SEQ ID NO: 21754 - RNA, 20 nt, synthetic construct
  source 1..20: mol_type = other RNA
ggaggcagtagggagccaaa

SEQ ID NO: 21755 - RNA, 20 nt, synthetic construct
  source 1..20: mol_type = other RNA
tccggggggatccctccccc

SEQ ID NO: 21756 - RNA, 20 nt, synthetic construct
  source 1..20: mol_type = other RNA
ggccccaaagcgaggtagag

SEQ ID NO: 21757 - RNA, 20 nt, synthetic construct
  source 1..20: mol_type = other RNA
gaggaccgcggcttttaaga

SEQ ID NO: 21758 - RNA, 20 nt, synthetic construct
  source 1..20: mol_type = other RNA
tcatctccaaagaccctgcc

SEQ ID NO: 21759 - RNA, 20 nt, synthetic construct
  source 1..20: mol_type = other RNA
agcgtttggaggcagggtct

SEQ ID NO: 21760 - RNA, 20 nt, synthetic construct
  source 1..20: mol_type = other RNA
gatgtaggttcccgggctca

SEQ ID NO: 21761 - RNA, 20 nt, synthetic construct
  source 1..20: mol_type = other RNA
cctcaccccaggcctagcca

SEQ ID NO: 21762 - RNA, 20 nt, synthetic construct
  source 1..20: mol_type = other RNA
cgcctcccagtgtctctgac

SEQ ID NO: 21763 - RNA, 20 nt, synthetic construct
  source 1..20: mol_type = other RNA
agacactgggaggcgctgat

SEQ ID NO: 21764 - RNA, 20 nt, synthetic construct
  source 1..20: mol_type = other RNA
aaaaggagtaccaggaggtg

SEQ ID NO: 21765 - RNA, 20 nt, synthetic construct
  source 1..20: mol_type = other RNA
tagaccagggttcaaatcct

SEQ ID NO: 21766 - RNA, 20 nt, synthetic construct
  source 1..20: mol_type = other RNA
acagactgggtatcaacagg

SEQ ID NO: 21767 - RNA, 20 nt, synthetic construct
  source 1..20: mol_type = other RNA
agagaaacctgttgataccc

SEQ ID NO: 21768 - RNA, 20 nt, synthetic construct
  source 1..20: mol_type = other RNA
ataccttgagaagagcagaa

SEQ ID NO: 21769 - RNA, 20 nt, synthetic construct
  source 1..20: mol_type = other RNA
aaattaacccaaggaaactc

SEQ ID NO: 21770 - RNA, 20 nt, synthetic construct
  source 1..20: mol_type = other RNA
ggaagtggctggagggaggt

SEQ ID NO: 21771 - RNA, 20 nt, synthetic construct
  source 1..20: mol_type = other RNA
tgtgactcaaggcaaatctg

SEQ ID NO: 21772 - RNA, 20 nt, synthetic construct
  source 1..20: mol_type = other RNA
atttgccttgagtcacactg

SEQ ID NO: 21773 - RNA, 20 nt, synthetic construct
  source 1..20: mol_type = other RNA
agaggggaagtcacttgtca

SEQ ID NO: 21774 - RNA, 20 nt, synthetic construct
  source 1..20: mol_type = other RNA
acatcatcaagcaagctctc

SEQ ID NO: 21775 - RNA, 20 nt, synthetic construct
  source 1..20: mol_type = other RNA
agaggggccgggagcagtgg

SEQ ID NO: 21776 - RNA, 20 nt, synthetic construct
  source 1..20: mol_type = other RNA
cctcccaagtagttgagatt

SEQ ID NO: 21777 - RNA, 20 nt, synthetic construct
  source 1..20: mol_type = other RNA
ctctcgggtaacctccacct

SEQ ID NO: 21778 - RNA, 20 nt, synthetic construct
  source 1..20: mol_type = other RNA
gaaaaaaaaaagagagagaa

SEQ ID NO: 21779 - RNA, 20 nt, synthetic construct
  source 1..20: mol_type = other RNA
agaggaaagcataggcagat

SEQ ID NO: 21780 - RNA, 20 nt, synthetic construct
  source 1..20: mol_type = other RNA
aaaggggcattagttaccac

SEQ ID NO: 21781 - RNA, 20 nt, synthetic construct
  source 1..20: mol_type = other RNA
aaggattgaaggaatctgaa

SEQ ID NO: 21782 - RNA, 20 nt, synthetic construct
  source 1..20: mol_type = other RNA
agactttgtccttgatgtca

SEQ ID NO: 21783 - RNA, 20 nt, synthetic construct
  source 1..20: mol_type = other RNA
attccttcaatccttctgac

SEQ ID NO: 21784 - RNA, 20 nt, synthetic construct
  source 1..20: mol_type = other RNA
ggaaaatcagagactttgtc

SEQ ID NO: 21785 - RNA, 20 nt, synthetic construct
  source 1..20: mol_type = other RNA
cttctttaccactttgttaa

SEQ ID NO: 21786 - RNA, 20 nt, synthetic construct
  source 1..20: mol_type = other RNA
tggcattaaatatttcaaac

SEQ ID NO: 21787 - RNA, 20 nt, synthetic construct
  source 1..20: mol_type = other RNA
tttgggaggatgaaaaagtt

SEQ ID NO: 21788 - RNA, 20 nt, synthetic construct
  source 1..20: mol_type = other RNA
acagatatttgtccacccat

SEQ ID NO: 21789 - RNA, 20 nt, synthetic construct
  source 1..20: mol_type = other RNA
catagattttacaatagctt

SEQ ID NO: 21790 - RNA, 20 nt, synthetic construct
  source 1..20: mol_type = other RNA
ctgccctctgctgccatgcc

SEQ ID NO: 21791 - RNA, 20 nt, synthetic construct
  source 1..20: mol_type = other RNA
gaaggaaagatataagaatt

SEQ ID NO: 21792 - RNA, 20 nt, synthetic construct
  source 1..20: mol_type = other RNA
cctcccaaagtgctggggtt

SEQ ID NO: 21793 - RNA, 20 nt, synthetic construct
  source 1..20: mol_type = other RNA
gagttcgagaccagcctggg

SEQ ID NO: 21794 - RNA, 20 nt, synthetic construct
  source 1..20: mol_type = other RNA
gcgattctcctccaccagcc

SEQ ID NO: 21795 - RNA, 20 nt, synthetic construct
  source 1..20: mol_type = other RNA
ggagtctgcagccgggccca

SEQ ID NO: 21796 - RNA, 20 nt, synthetic construct
  source 1..20: mol_type = other RNA
atctcagcaagcaggactgg

SEQ ID NO: 21797 - RNA, 20 nt, synthetic construct
  source 1..20: mol_type = other RNA
caagcaggactggctcgtgg

SEQ ID NO: 21798 - RNA, 20 nt, synthetic construct
  source 1..20: mol_type = other RNA
gactggagtgtggggcctgg

SEQ ID NO: 21799 - RNA, 20 nt, synthetic construct
  source 1..20: mol_type = other RNA
gttcccttccaggaaaaact

SEQ ID NO: 21800 - RNA, 20 nt, synthetic construct
  source 1..20: mol_type = other RNA
tgtcctcaatcgggacccag

SEQ ID NO: 21801 - RNA, 20 nt, synthetic construct
  source 1..20: mol_type = other RNA
gcaagccacctatcttctct

SEQ ID NO: 21802 - RNA, 20 nt, synthetic construct
  source 1..20: mol_type = other RNA
agggggcatctgtggtgtct

SEQ ID NO: 21803 - RNA, 20 nt, synthetic construct
  source 1..20: mol_type = other RNA
gtcagattgtctgggaagcc

SEQ ID NO: 21804 - RNA, 20 nt, synthetic construct
  source 1..20: mol_type = other RNA
attgtctgggaagccaagta

SEQ ID NO: 21805 - RNA, 20 nt, synthetic construct
  source 1..20: mol_type = other RNA
tctggtgctgagtgttcatc

SEQ ID NO: 21806 - RNA, 20 nt, synthetic construct
  source 1..20: mol_type = other RNA
caccagactgatacatttgt

SEQ ID NO: 21807 - RNA, 20 nt, synthetic construct
  source 1..20: mol_type = other RNA
tcacaagtgaaatgagtctg

SEQ ID NO: 21808 - RNA, 20 nt, synthetic construct
  source 1..20: mol_type = other RNA
cagttggaggcaggttaaag

SEQ ID NO: 21809 - RNA, 20 nt, synthetic construct
  source 1..20: mol_type = other RNA
agcaggaaagtggaaaacaa

SEQ ID NO: 21810 - RNA, 20 nt, synthetic construct
  source 1..20: mol_type = other RNA
cagggagcagctctttgcat

SEQ ID NO: 21811 - RNA, 20 nt, synthetic construct
  source 1..20: mol_type = other RNA
gagcttgaggctgcagtgag

SEQ ID NO: 21812 - RNA, 20 nt, synthetic construct
  source 1..20: mol_type = other RNA
cctcccaagtagccgagact

SEQ ID NO: 21813 - RNA, 20 nt, synthetic construct
  source 1..20: mol_type = other RNA
aaataaaagatacaaaaatt

SEQ ID NO: 21814 - RNA, 20 nt, synthetic construct
  source 1..20: mol_type = other RNA
cctcccaaagtgctgggatt

SEQ ID NO: 21815 - RNA, 20 nt, synthetic construct
  source 1..20: mol_type = other RNA
atggaaaggtgattaagagg

SEQ ID NO: 21816 - RNA, 20 nt, synthetic construct
  source 1..20: mol_type = other RNA
acagcttacctcttaatcac

SEQ ID NO: 21817 - RNA, 20 nt, synthetic construct
  source 1..20: mol_type = other RNA
ctgtgccacaggggcttggc

SEQ ID NO: 21818 - RNA, 20 nt, synthetic construct
  source 1..20: mol_type = other RNA
aaaggggatttagagccaac

SEQ ID NO: 21819 - RNA, 20 nt, synthetic construct
  source 1..20: mol_type = other RNA
gagaggtctggagatattgc

SEQ ID NO: 21820 - RNA, 20 nt, synthetic construct
  source 1..20: mol_type = other RNA
atgagcttcgtgtcaggaga

SEQ ID NO: 21821 - RNA, 20 nt, synthetic construct
  source 1..20: mol_type = other RNA
gggcttatgggcctggaaac

SEQ ID NO: 21822 - RNA, 20 nt, synthetic construct
  source 1..20: mol_type = other RNA
atcctgcaactgtttccagg

SEQ ID NO: 21823 - RNA, 20 nt, synthetic construct
  source 1..20: mol_type = other RNA
gtgtatctttctgtttgtat

SEQ ID NO: 21824 - RNA, 20 nt, synthetic construct
  source 1..20: mol_type = other RNA
cctgggtgacagagtgagac

SEQ ID NO: 21825 - RNA, 20 nt, synthetic construct
  source 1..20: mol_type = other RNA
gagtttgagaccagcctggc

SEQ ID NO: 21826 - RNA, 20 nt, synthetic construct
  source 1..20: mol_type = other RNA
gtgatccacccgcctcggcc

SEQ ID NO: 21827 - RNA, 20 nt, synthetic construct
  source 1..20: mol_type = other RNA
aagcaaggcaagtagatcct

SEQ ID NO: 21828 - RNA, 20 nt, synthetic construct
  source 1..20: mol_type = other RNA
atgggttctcctggggagtt

SEQ ID NO: 21829 - RNA, 20 nt, synthetic construct
  source 1..20: mol_type = other RNA
ctcttgggtctatatatcct

SEQ ID NO: 21830 - RNA, 20 nt, synthetic construct
  source 1..20: mol_type = other RNA
gatatatagacccaagagct

SEQ ID NO: 21831 - RNA, 20 nt, synthetic construct
  source 1..20: mol_type = other RNA
agaggttgagtaacatttgc

SEQ ID NO: 21832 - RNA, 20 nt, synthetic construct
  source 1..20: mol_type = other RNA
ttccttactggccccaaaga

SEQ ID NO: 21833 - RNA, 20 nt, synthetic construct
  source 1..20: mol_type = other RNA
tgactttcttacggggtgct

SEQ ID NO: 21834 - RNA, 20 nt, synthetic construct
  source 1..20: mol_type = other RNA
tgaatcattgttttacagct

SEQ ID NO: 21835 - RNA, 20 nt, synthetic construct
  source 1..20: mol_type = other RNA
aatctcaaaaagactcaatt

SEQ ID NO: 21836 - RNA, 20 nt, synthetic construct
  source 1..20: mol_type = other RNA
agggctaaggtaatgtactc

SEQ ID NO: 21837 - RNA, 20 nt, synthetic construct
  source 1..20: mol_type = other RNA
gatcaaaggcagagcagaaa

SEQ ID NO: 21838 - RNA, 20 nt, synthetic construct
  source 1..20: mol_type = other RNA
aggtcttcccattattcctc

SEQ ID NO: 21839 - RNA, 20 nt, synthetic construct
  source 1..20: mol_type = other RNA
gaggagaagttcatggtcaa

SEQ ID NO: 21840 - RNA, 20 nt, synthetic construct
  source 1..20: mol_type = other RNA
acaaaaaaaaaaaaagcttg

SEQ ID NO: 21841 - RNA, 20 nt, synthetic construct
  source 1..20: mol_type = other RNA
cctcccaagtagctgggatt

SEQ ID NO: 21842 - RNA, 20 nt, synthetic construct
  source 1..20: mol_type = other RNA
gagttcaagaccagcctgac

SEQ ID NO: 21843 - RNA, 20 nt, synthetic construct
  source 1..20: mol_type = other RNA
gctggtcttgaactcctgac

SEQ ID NO: 21844 - RNA, 20 nt, synthetic construct
  source 1..20: mol_type = other RNA
agcagtgctggaggctttta

SEQ ID NO: 21845 - RNA, 20 nt, synthetic construct
  source 1..20: mol_type = other RNA
tgcctccttagaccctcaaa

SEQ ID NO: 21846 - RNA, 20 nt, synthetic construct
  source 1..20: mol_type = other RNA
cgcctgcgtctgtaaaatgg

SEQ ID NO: 21847 - RNA, 20 nt, synthetic construct
  source 1..20: mol_type = other RNA
tttccttatctgtaaagtgg

SEQ ID NO: 21848 - RNA, 20 nt, synthetic construct
  source 1..20: mol_type = other RNA
gttatccctacctaccaacg

SEQ ID NO: 21849 - RNA, 20 nt, synthetic construct
  source 1..20: mol_type = other RNA
atggtgagctttggggtgaa

SEQ ID NO: 21850 - RNA, 20 nt, synthetic construct
  source 1..20: mol_type = other RNA
ctggtgggagatgaatggag

SEQ ID NO: 21851 - RNA, 20 nt, synthetic construct
  source 1..20: mol_type = other RNA
tgcatgcatctcttctggga

SEQ ID NO: 21852 - RNA, 20 nt, synthetic construct
  source 1..20: mol_type = other RNA
acttaaactatctgaagatc

SEQ ID NO: 21853 - RNA, 20 nt, synthetic construct
  source 1..20: mol_type = other RNA
gtgtcgccacaatgttctaa

SEQ ID NO: 21854 - RNA, 20 nt, synthetic construct
  source 1..20: mol_type = other RNA
atagtttaagtctgagttag

SEQ ID NO: 21855 - RNA, 20 nt, synthetic construct
  source 1..20: mol_type = other RNA
acacctgtttagtgtctaca

SEQ ID NO: 21856 - RNA, 20 nt, synthetic construct
  source 1..20: mol_type = other RNA
gaatattttctcgagttgga

SEQ ID NO: 21857 - RNA, 20 nt, synthetic construct
  source 1..20: mol_type = other RNA
cccactctatagcctttttg

SEQ ID NO: 21858 - RNA, 20 nt, synthetic construct
  source 1..20: mol_type = other RNA
agggattagtgggctgagat

SEQ ID NO: 21859 - RNA, 20 nt, synthetic construct
  source 1..20: mol_type = other RNA
atgaagagacaggctcagag

SEQ ID NO: 21860 - RNA, 20 nt, synthetic construct
  source 1..20: mol_type = other RNA
cccactaatccctctgagcc

SEQ ID NO: 21861 - RNA, 20 nt, synthetic construct
  source 1..20: mol_type = other RNA
ctatttgtattcctgttttt

SEQ ID NO: 21862 - RNA, 20 nt, synthetic construct
  source 1..20: mol_type = other RNA
catgtttctgcgcatggcag

SEQ ID NO: 21863 - RNA, 20 nt, synthetic construct
  source 1..20: mol_type = other RNA
ctctccctgagggcagggac

SEQ ID NO: 21864 - RNA, 20 nt, synthetic construct
  source 1..20: mol_type = other RNA
ggagagctgaagggctctct

SEQ ID NO: 21865 - RNA, 20 nt, synthetic construct
  source 1..20: mol_type = other RNA
ggccatcttttccctccatc

SEQ ID NO: 21866 - RNA, 20 nt, synthetic construct
  source 1..20: mol_type = other RNA
gcccaagactctaggtttcc

SEQ ID NO: 21867 - RNA, 20 nt, synthetic construct
  source 1..20: mol_type = other RNA
ctttgacaccctctaatgta

SEQ ID NO: 21868 - RNA, 20 nt, synthetic construct
  source 1..20: mol_type = other RNA
aaggccaagggagttctgtg

SEQ ID NO: 21869 - RNA, 20 nt, synthetic construct
  source 1..20: mol_type = other RNA
cctcccaagtagctgggatt

SEQ ID NO: 21870 - RNA, 20 nt, synthetic construct
  source 1..20: mol_type = other RNA
gagtttgagaccagcccggg

SEQ ID NO: 21871 - RNA, 20 nt, synthetic construct
  source 1..20: mol_type = other RNA
ttttcccaatattagttctg

SEQ ID NO: 21872 - RNA, 20 nt, synthetic construct
  source 1..20: mol_type = other RNA
agaggtcaagtgacttggct

SEQ ID NO: 21873 - RNA, 20 nt, synthetic construct
  source 1..20: mol_type = other RNA
atgcaagctcctaaaccaca

SEQ ID NO: 21874 - RNA, 20 nt, synthetic construct
  source 1..20: mol_type = other RNA
tgaaatggcttgtccaaggt

SEQ ID NO: 21875 - RNA, 20 nt, synthetic construct
  source 1..20: mol_type = other RNA
atggtgtggaggatggaggc

SEQ ID NO: 21876 - RNA, 20 nt, synthetic construct
  source 1..20: mol_type = other RNA
cgccccacttcctgcttccc

SEQ ID NO: 21877 - RNA, 20 nt, synthetic construct
  source 1..20: mol_type = other RNA
tcttagggaagcaggaagtg

SEQ ID NO: 21878 - RNA, 20 nt, synthetic construct
  source 1..20: mol_type = other RNA
tggtggtgatggggagcgtg

SEQ ID NO: 21879 - RNA, 20 nt, synthetic construct
  source 1..20: mol_type = other RNA
aaaaaaaaaaaaggccccca

SEQ ID NO: 21880 - RNA, 20 nt, synthetic construct
  source 1..20: mol_type = other RNA
ttcactgcagccttgacacc

SEQ ID NO: 21881 - RNA, 20 nt, synthetic construct
  source 1..20: mol_type = other RNA
gaggctgaggtgggaggata

SEQ ID NO: 21882 - RNA, 20 nt, synthetic construct
  source 1..20: mol_type = other RNA
cctcctgagtagctggttct

SEQ ID NO: 21883 - RNA, 20 nt, synthetic construct
  source 1..20: mol_type = other RNA
tccaggagtttgagaccagc

SEQ ID NO: 21884 - RNA, 20 nt, synthetic construct
  source 1..20: mol_type = other RNA
taagtgctgaatgaacagaa

SEQ ID NO: 21885 - RNA, 20 nt, synthetic construct
  source 1..20: mol_type = other RNA
cacttactgattgccagtcc

SEQ ID NO: 21886 - RNA, 20 nt, synthetic construct
  source 1..20: mol_type = other RNA
tttccatatctataaaatgc

SEQ ID NO: 21887 - RNA, 20 nt, synthetic construct
  source 1..20: mol_type = other RNA
agaaataaattgagaaggga

SEQ ID NO: 21888 - RNA, 20 nt, synthetic construct
  source 1..20: mol_type = other RNA
tcttgtcatctgcagagtga

SEQ ID NO: 21889 - RNA, 20 nt, synthetic construct
  source 1..20: mol_type = other RNA
ttttctcacagggcattggg

SEQ ID NO: 21890 - RNA, 20 nt, synthetic construct
  source 1..20: mol_type = other RNA
tctggagctcttgtcacgag

SEQ ID NO: 21891 - RNA, 20 nt, synthetic construct
  source 1..20: mol_type = other RNA
agcagtgagaaaagacacct

SEQ ID NO: 21892 - RNA, 20 nt, synthetic construct
  source 1..20: mol_type = other RNA
gcaggagctggggcaaaggt

SEQ ID NO: 21893 - RNA, 20 nt, synthetic construct
  source 1..20: mol_type = other RNA
ggacacaggcacaaaatctg

SEQ ID NO: 21894 - RNA, 20 nt, synthetic construct
  source 1..20: mol_type = other RNA
ttctgcttcctctagtcatg

SEQ ID NO: 21895 - RNA, 20 nt, synthetic construct
  source 1..20: mol_type = other RNA
cacagacccccggatgtcac

SEQ ID NO: 21896 - RNA, 20 nt, synthetic construct
  source 1..20: mol_type = other RNA
gtgatccacccgccttggcc

SEQ ID NO: 21897 - RNA, 20 nt, synthetic construct
  source 1..20: mol_type = other RNA
gctggtttcgaactcccgac

SEQ ID NO: 21898 - RNA, 20 nt, synthetic construct
  source 1..20: mol_type = other RNA
gaatggggtggcaagttgag

SEQ ID NO: 21899 - RNA, 20 nt, synthetic construct
  source 1..20: mol_type = other RNA
ggccagctctcctcttacct

SEQ ID NO: 21900 - RNA, 20 nt, synthetic construct
  source 1..20: mol_type = other RNA
tgtgactttatttgggaaaa

SEQ ID NO: 21901 - RNA, 20 nt, synthetic construct
  source 1..20: mol_type = other RNA
cttcccaaagtgctgggatt

SEQ ID NO: 21902 - RNA, 20 nt, synthetic construct
  source 1..20: mol_type = other RNA
gtgatcctccaatctcagct

SEQ ID NO: 21903 - RNA, 20 nt, synthetic construct
  source 1..20: mol_type = other RNA
gagttcaagaccagcgtggc

SEQ ID NO: 21904 - RNA, 20 nt, synthetic construct
  source 1..20: mol_type = other RNA
gagactggggcaggagaatc

SEQ ID NO: 21905 - RNA, 20 nt, synthetic construct
  source 1..20: mol_type = other RNA
ctttagtggccacatcacct

SEQ ID NO: 21906 - RNA, 20 nt, synthetic construct
  source 1..20: mol_type = other RNA
cagggccacgctgcctctgg

SEQ ID NO: 21907 - RNA, 20 nt, synthetic construct
  source 1..20: mol_type = other RNA
aacaacagcactttattctc

SEQ ID NO: 21908 - RNA, 20 nt, synthetic construct
  source 1..20: mol_type = other RNA
gtccatgtttccatggtata

SEQ ID NO: 21909 - RNA, 20 nt, synthetic construct
  source 1..20: mol_type = other RNA
cagccctgggaaatgaatat

SEQ ID NO: 21910 - RNA, 20 nt, synthetic construct
  source 1..20: mol_type = other RNA
cttggctttccccagcaaga

SEQ ID NO: 21911 - RNA, 20 nt, synthetic construct
  source 1..20: mol_type = other RNA
gagtttgagaacagcctggc

SEQ ID NO: 21912 - RNA, 20 nt, synthetic construct
  source 1..20: mol_type = other RNA
cctcctgagcagctgggatt

SEQ ID NO: 21913 - RNA, 20 nt, synthetic construct
  source 1..20: mol_type = other RNA
gaggctgaggcagaagaatg

SEQ ID NO: 21914 - RNA, 20 nt, synthetic construct
  source 1..20: mol_type = other RNA
tgttcttttgggaatactca

SEQ ID NO: 21915 - RNA, 20 nt, synthetic construct
  source 1..20: mol_type = other RNA
agagttgtgtgaccatctcc

SEQ ID NO: 21916 - RNA, 20 nt, synthetic construct
  source 1..20: mol_type = other RNA
cagttgttccccatttcctt

SEQ ID NO: 21917 - RNA, 20 nt, synthetic construct
  source 1..20: mol_type = other RNA
cctcccaaagtgctgggatt

SEQ ID NO: 21918 - RNA, 20 nt, synthetic construct
  source 1..20: mol_type = other RNA
gcatgagccaccacgcccca

SEQ ID NO: 21919 - RNA, 20 nt, synthetic construct
  source 1..20: mol_type = other RNA
tgctttctccctttaatggt

SEQ ID NO: 21920 - RNA, 20 nt, synthetic construct
  source 1..20: mol_type = other RNA
gatatttgaggtatccacat

SEQ ID NO: 21921 - RNA, 20 nt, synthetic construct
  source 1..20: mol_type = other RNA
tttcctaatatgtaaactga

SEQ ID NO: 21922 - RNA, 20 nt, synthetic construct
  source 1..20: mol_type = other RNA
actccttcagtttacatatt

SEQ ID NO: 21923 - RNA, 20 nt, synthetic construct
  source 1..20: mol_type = other RNA
tttacatattaggaaactga

SEQ ID NO: 21924 - RNA, 20 nt, synthetic construct
  source 1..20: mol_type = other RNA
tcagactgtctgggttcaaa

SEQ ID NO: 21925 - RNA, 20 nt, synthetic construct
  source 1..20: mol_type = other RNA
actgtctgggttcaaatcct

SEQ ID NO: 21926 - RNA, 20 nt, synthetic construct
  source 1..20: mol_type = other RNA
agaggtgaagtgatttatgt

SEQ ID NO: 21927 - RNA, 20 nt, synthetic construct
  source 1..20: mol_type = other RNA
ttttctcatatgcaaagtga

SEQ ID NO: 21928 - RNA, 20 nt, synthetic construct
  source 1..20: mol_type = other RNA
taaccatgtaaggaaggtat

SEQ ID NO: 21929 - RNA, 20 nt, synthetic construct
  source 1..20: mol_type = other RNA
gagacccgtcccacatttgg

SEQ ID NO: 21930 - RNA, 20 nt, synthetic construct
  source 1..20: mol_type = other RNA
cgtggtggagagagcaagcc

SEQ ID NO: 21931 - RNA, 20 nt, synthetic construct
  source 1..20: mol_type = other RNA
cacctcttatatgctcagcg

SEQ ID NO: 21932 - RNA, 20 nt, synthetic construct
  source 1..20: mol_type = other RNA
tcacctcacagggtgttgga

SEQ ID NO: 21933 - RNA, 20 nt, synthetic construct
  source 1..20: mol_type = other RNA
catcgctgttaagaagctcc

SEQ ID NO: 21934 - RNA, 20 nt, synthetic construct
  source 1..20: mol_type = other RNA
gtgggccctcctccctctgg

SEQ ID NO: 21935 - RNA, 20 nt, synthetic construct
  source 1..20: mol_type = other RNA
cttgctgtagagacggcaat

SEQ ID NO: 21936 - RNA, 20 nt, synthetic construct
  source 1..20: mol_type = other RNA
gggaaattctggtccctgcc

SEQ ID NO: 21937 - RNA, 20 nt, synthetic construct
  source 1..20: mol_type = other RNA
caccacggacagctcccacg

SEQ ID NO: 21938 - RNA, 20 nt, synthetic construct
  source 1..20: mol_type = other RNA
caggctgttgtgtgacatgg

SEQ ID NO: 21939 - RNA, 20 nt, synthetic construct
  source 1..20: mol_type = other RNA
gtgcttcctcaccgatattg

SEQ ID NO: 21940 - RNA, 20 nt, synthetic construct
  source 1..20: mol_type = other RNA
tcccctcccacagaaatcat

SEQ ID NO: 21941 - RNA, 20 nt, synthetic construct
  source 1..20: mol_type = other RNA
atctgtacattactatctct

SEQ ID NO: 21942 - RNA, 20 nt, synthetic construct
  source 1..20: mol_type = other RNA
acaagggcaggactcttggg

SEQ ID NO: 21943 - RNA, 20 nt, synthetic construct
  source 1..20: mol_type = other RNA
cagttctgtgcttgatccaa

SEQ ID NO: 21944 - RNA, 20 nt, synthetic construct
  source 1..20: mol_type = other RNA
ttctgtaatttctgaaacat

SEQ ID NO: 21945 - RNA, 20 nt, synthetic construct
  source 1..20: mol_type = other RNA
aaattacagaactgagagct

SEQ ID NO: 21946 - RNA, 20 nt, synthetic construct
  source 1..20: mol_type = other RNA
ccccaatcacttctgcttcc

SEQ ID NO: 21947 - RNA, 20 nt, synthetic construct
  source 1..20: mol_type = other RNA
gtatgttgttttaagcaaca

SEQ ID NO: 21948 - RNA, 20 nt, synthetic construct
  source 1..20: mol_type = other RNA
tgtcaggtatgttgttttaa

SEQ ID NO: 21949 - RNA, 20 nt, synthetic construct
  source 1..20: mol_type = other RNA
cctccataactgtaagaaat

SEQ ID NO: 21950 - RNA, 20 nt, synthetic construct
  source 1..20: mol_type = other RNA
gatgctgcaaaagaatactt

SEQ ID NO: 21951 - RNA, 20 nt, synthetic construct
  source 1..20: mol_type = other RNA
tcttacaaccatcccgtgat

SEQ ID NO: 21952 - RNA, 20 nt, synthetic construct
  source 1..20: mol_type = other RNA
tagatgttaggtactacccc

SEQ ID NO: 21953 - RNA, 20 nt, synthetic construct
  source 1..20: mol_type = other RNA
ctcagaagccttctatggct

SEQ ID NO: 21954 - RNA, 20 nt, synthetic construct
  source 1..20: mol_type = other RNA
aagccttctatggctcccca

SEQ ID NO: 21955 - RNA, 20 nt, synthetic construct
  source 1..20: mol_type = other RNA
agtatgtttaggaaaccctg

SEQ ID NO: 21956 - RNA, 20 nt, synthetic construct
  source 1..20: mol_type = other RNA
ggtttcctaaacatactctg

SEQ ID NO: 21957 - RNA, 20 nt, synthetic construct
  source 1..20: mol_type = other RNA
ggaaggcttcctggaggaag

SEQ ID NO: 21958 - RNA, 20 nt, synthetic construct
  source 1..20: mol_type = other RNA
agcccttggaatataggcac

SEQ ID NO: 21959 - RNA, 20 nt, synthetic construct
  source 1..20: mol_type = other RNA
taaatagtggtaactatata

SEQ ID NO: 21960 - RNA, 20 nt, synthetic construct
  source 1..20: mol_type = other RNA
tgttcattcatttgtttgat

SEQ ID NO: 21961 - RNA, 20 nt, synthetic construct
  source 1..20: mol_type = other RNA
ttagaccttgttgattgact

SEQ ID NO: 21962 - RNA, 20 nt, synthetic construct
  source 1..20: mol_type = other RNA
gccctccagctgggagtcct

SEQ ID NO: 21963 - RNA, 20 nt, synthetic construct
  source 1..20: mol_type = other RNA
taagtttgtggtgggtgggg

SEQ ID NO: 21964 - RNA, 20 nt, synthetic construct
  source 1..20: mol_type = other RNA
cctgcatttcctgccttgtt

SEQ ID NO: 21965 - RNA, 20 nt, synthetic construct
  source 1..20: mol_type = other RNA
gtattagggcaccccccagg

SEQ ID NO: 21966 - RNA, 20 nt, synthetic construct
  source 1..20: mol_type = other RNA
acccctctccccaaggtggg

SEQ ID NO: 21967 - RNA, 20 nt, synthetic construct
  source 1..20: mol_type = other RNA
ggaggggctcactcacgtct

SEQ ID NO: 21968 - RNA, 20 nt, synthetic construct
  source 1..20: mol_type = other RNA
aaaagacgtgagtgagcccc

SEQ ID NO: 21969 - RNA, 20 nt, synthetic construct
  source 1..20: mol_type = other RNA
atgtacattttaaggctcct

SEQ ID NO: 21970 - RNA, 20 nt, synthetic construct
  source 1..20: mol_type = other RNA
ggccatgaaataatcagatg

SEQ ID NO: 21971 - RNA, 20 nt, synthetic construct
  source 1..20: mol_type = other RNA
ccaccaccagcttctccact

SEQ ID NO: 21972 - RNA, 20 nt, synthetic construct
  source 1..20: mol_type = other RNA
ccatgggaagaactggggga

SEQ ID NO: 21973 - RNA, 20 nt, synthetic construct
  source 1..20: mol_type = other RNA
agaagggttccaggaagagg

SEQ ID NO: 21974 - RNA, 20 nt, synthetic construct
  source 1..20: mol_type = other RNA
ttattctcaccttgtgtgtc

SEQ ID NO: 21975 - RNA, 20 nt, synthetic construct
  source 1..20: mol_type = other RNA
tagatatctgttgaatgaaa

SEQ ID NO: 21976 - RNA, 20 nt, synthetic construct
  source 1..20: mol_type = other RNA
ttaactgttacacccatttt

SEQ ID NO: 21977 - RNA, 20 nt, synthetic construct
  source 1..20: mol_type = other RNA
acccataataagtactcagt

SEQ ID NO: 21978 - RNA, 20 nt, synthetic construct
  source 1..20: mol_type = other RNA
ttcttaaacaggtgaatcgc

SEQ ID NO: 21979 - RNA, 20 nt, synthetic construct
  source 1..20: mol_type = other RNA
tgaaggctgggcgcagcggc

SEQ ID NO: 21980 - RNA, 20 nt, synthetic construct
  source 1..20: mol_type = other RNA
gagtttgatacctgcctggc

SEQ ID NO: 21981 - RNA, 20 nt, synthetic construct
  source 1..20: mol_type = other RNA
cctcccgagtagctgggatt

SEQ ID NO: 21982 - RNA, 20 nt, synthetic construct
  source 1..20: mol_type = other RNA
tgaaaaaaaaatctccctcc

SEQ ID NO: 21983 - RNA, 20 nt, synthetic construct
  source 1..20: mol_type = other RNA
ttttgctcctatcttagtca

SEQ ID NO: 21984 - RNA, 20 nt, synthetic construct
  source 1..20: mol_type = other RNA
aaataaagcgagctcctgta

SEQ ID NO: 21985 - RNA, 20 nt, synthetic construct
  source 1..20: mol_type = other RNA
cagcttctttattttctttc

SEQ ID NO: 21986 - RNA, 20 nt, synthetic construct
  source 1..20: mol_type = other RNA
gtgatctgccagccttggcc

SEQ ID NO: 21987 - RNA, 20 nt, synthetic construct
  source 1..20: mol_type = other RNA
catcctttcttttaaggcca

SEQ ID NO: 21988 - RNA, 20 nt, synthetic construct
  source 1..20: mol_type = other RNA
tgagtgagtatcaagcactc

SEQ ID NO: 21989 - RNA, 20 nt, synthetic construct
  source 1..20: mol_type = other RNA
agaagctgcattgcaaaggc

SEQ ID NO: 21990 - RNA, 20 nt, synthetic construct
  source 1..20: mol_type = other RNA
gactctagcaggctatacgg

SEQ ID NO: 21991 - RNA, 20 nt, synthetic construct
  source 1..20: mol_type = other RNA
ctgccccagggagaggatgt

SEQ ID NO: 21992 - RNA, 20 nt, synthetic construct
  source 1..20: mol_type = other RNA
gtctgccggaagctcctctg

SEQ ID NO: 21993 - RNA, 20 nt, synthetic construct
  source 1..20: mol_type = other RNA
acttgggccaggagttcaat

SEQ ID NO: 21994 - RNA, 20 nt, synthetic construct
  source 1..20: mol_type = other RNA
cctctacccaaagaagggca

SEQ ID NO: 21995 - RNA, 20 nt, synthetic construct
  source 1..20: mol_type = other RNA
catagctctcagagccaagt

SEQ ID NO: 21996 - RNA, 20 nt, synthetic construct
  source 1..20: mol_type = other RNA
agccaagtcacaaggagagg

SEQ ID NO: 21997 - RNA, 20 nt, synthetic construct
  source 1..20: mol_type = other RNA
caactgctctgtgccaggca

SEQ ID NO: 21998 - RNA, 20 nt, synthetic construct
  source 1..20: mol_type = other RNA
ccctggctgcagctgtgttg

SEQ ID NO: 21999 - RNA, 20 nt, synthetic construct
  source 1..20: mol_type = other RNA
gagagacatccatgccactc

SEQ ID NO: 22000 - RNA, 20 nt, synthetic construct
  source 1..20: mol_type = other RNA
ctgtgaggaagtgggctgtg

SEQ ID NO: 22001 - RNA, 20 nt, synthetic construct
  source 1..20: mol_type = other RNA
gaactggacctcacctctcc

SEQ ID NO: 22002 - RNA, 20 nt, synthetic construct
  source 1..20: mol_type = other RNA
tgtcactcacctctgcccca

SEQ ID NO: 22003 - RNA, 20 nt, synthetic construct
  source 1..20: mol_type = other RNA
ctcaatccctggcagagaac

SEQ ID NO: 22004 - RNA, 20 nt, synthetic construct
  source 1..20: mol_type = other RNA
aaggaaacacatccgtgcga

SEQ ID NO: 22005 - RNA, 20 nt, synthetic construct
  source 1..20: mol_type = other RNA
gagggaatctccaccaatta

SEQ ID NO: 22006 - RNA, 20 nt, synthetic construct
  source 1..20: mol_type = other RNA
ctcttcatggagccccttct

SEQ ID NO: 22007 - RNA, 20 nt, synthetic construct
  source 1..20: mol_type = other RNA
ggcaggacagaaacagctac

SEQ ID NO: 22008 - RNA, 20 nt, synthetic construct
  source 1..20: mol_type = other RNA
acattaatcaaataagcaaa

SEQ ID NO: 22009 - RNA, 20 nt, synthetic construct
  source 1..20: mol_type = other RNA
gcagctcaacgaggaactgg

SEQ ID NO: 22010 - RNA, 20 nt, synthetic construct
  source 1..20: mol_type = other RNA
ggagattcaggcagctcaac

SEQ ID NO: 22011 - RNA, 20 nt, synthetic construct
  source 1..20: mol_type = other RNA
agatttgccagagcccatgg

SEQ ID NO: 22012 - RNA, 20 nt, synthetic construct
  source 1..20: mol_type = other RNA
gtaggagggagaggtggtcg

SEQ ID NO: 22013 - RNA, 20 nt, synthetic construct
  source 1..20: mol_type = other RNA
ggagcagtcaggtaggaggg

SEQ ID NO: 22014 - RNA, 20 nt, synthetic construct
  source 1..20: mol_type = other RNA
gaatctctgctcttctgctt

SEQ ID NO: 22015 - RNA, 20 nt, synthetic construct
  source 1..20: mol_type = other RNA
aaggggaaagcaacatatgg

SEQ ID NO: 22016 - RNA, 20 nt, synthetic construct
  source 1..20: mol_type = other RNA
tatactaaaagagtgagaga

SEQ ID NO: 22017 - RNA, 20 nt, synthetic construct
  source 1..20: mol_type = other RNA
agaaagctatgcaaggatgc

SEQ ID NO: 22018 - RNA, 20 nt, synthetic construct
  source 1..20: mol_type = other RNA
tagggaccattttactgatt

SEQ ID NO: 22019 - RNA, 20 nt, synthetic construct
  source 1..20: mol_type = other RNA
tgtggtgggtcagtagggac

SEQ ID NO: 22020 - RNA, 20 nt, synthetic construct
  source 1..20: mol_type = other RNA
taaaatggtccctactgacc

SEQ ID NO: 22021 - RNA, 20 nt, synthetic construct
  source 1..20: mol_type = other RNA
ggaaggtgtgtttgggctgt

SEQ ID NO: 22022 - RNA, 20 nt, synthetic construct
  source 1..20: mol_type = other RNA
ggatgagaccaggaggatgc

SEQ ID NO: 22023 - RNA, 20 nt, synthetic construct
  source 1..20: mol_type = other RNA
tataacgcactggtatctca

SEQ ID NO: 22024 - RNA, 20 nt, synthetic construct
  source 1..20: mol_type = other RNA
gaactgcttctctgcttctg

SEQ ID NO: 22025 - RNA, 20 nt, synthetic construct
  source 1..20: mol_type = other RNA
aagcagagaagcagttcctg

SEQ ID NO: 22026 - RNA, 20 nt, synthetic construct
  source 1..20: mol_type = other RNA
tgctcattttcctagatatc

SEQ ID NO: 22027 - RNA, 20 nt, synthetic construct
  source 1..20: mol_type = other RNA
gacagagctgaagaaagagc

SEQ ID NO: 22028 - RNA, 20 nt, synthetic construct
  source 1..20: mol_type = other RNA
ctctgtcctgaaatatcttc

SEQ ID NO: 22029 - RNA, 20 nt, synthetic construct
  source 1..20: mol_type = other RNA
gaagtctggagagaagagag

SEQ ID NO: 22030 - RNA, 20 nt, synthetic construct
  source 1..20: mol_type = other RNA
tggctgatggagcgaagggg

SEQ ID NO: 22031 - RNA, 20 nt, synthetic construct
  source 1..20: mol_type = other RNA
gcatgctgggcaggtcagtg

SEQ ID NO: 22032 - RNA, 20 nt, synthetic construct
  source 1..20: mol_type = other RNA
ggcaggttcaggcatgctgg

SEQ ID NO: 22033 - RNA, 20 nt, synthetic construct
  source 1..20: mol_type = other RNA
ccactgacctgcccagcatg

SEQ ID NO: 22034 - RNA, 20 nt, synthetic construct
  source 1..20: mol_type = other RNA
tcgggacagggagggtctcc

SEQ ID NO: 22035 - RNA, 20 nt, synthetic construct
  source 1..20: mol_type = other RNA
ccttcagctgcttgttaccc

SEQ ID NO: 22036 - RNA, 20 nt, synthetic construct
  source 1..20: mol_type = other RNA
ctgcttgttacccagcagaa

SEQ ID NO: 22037 - RNA, 20 nt, synthetic construct
  source 1..20: mol_type = other RNA
ggttttcaacttcaaaagat

SEQ ID NO: 22038 - RNA, 20 nt, synthetic construct
  source 1..20: mol_type = other RNA
atcttttgaagttgaaaacc

SEQ ID NO: 22039 - RNA, 20 nt, synthetic construct
  source 1..20: mol_type = other RNA
atcactgcaacctccgccct

SEQ ID NO: 22040 - RNA, 20 nt, synthetic construct
  source 1..20: mol_type = other RNA
cctccggagcagctggaatt

SEQ ID NO: 22041 - RNA, 20 nt, synthetic construct
  source 1..20: mol_type = other RNA
tagagacaagtttaaccatg

SEQ ID NO: 22042 - RNA, 20 nt, synthetic construct
  source 1..20: mol_type = other RNA
gagttcgagaccagcctggc

SEQ ID NO: 22043 - RNA, 20 nt, synthetic construct
  source 1..20: mol_type = other RNA
gctgggtgcagtggctcaca

SEQ ID NO: 22044 - RNA, 20 nt, synthetic construct
  source 1..20: mol_type = other RNA
gccgctatcttataacctcc

SEQ ID NO: 22045 - RNA, 20 nt, synthetic construct
  source 1..20: mol_type = other RNA
cccatgaaggctgtaaggac

SEQ ID NO: 22046 - RNA, 20 nt, synthetic construct
  source 1..20: mol_type = other RNA
cctgacaatgaagtgttaac

SEQ ID NO: 22047 - RNA, 20 nt, synthetic construct
  source 1..20: mol_type = other RNA
gctgagagaatgaatgaggg

SEQ ID NO: 22048 - RNA, 20 nt, synthetic construct
  source 1..20: mol_type = other RNA
tagcctcatctggaaaatgg

SEQ ID NO: 22049 - RNA, 20 nt, synthetic construct
  source 1..20: mol_type = other RNA
aattgctccagcaagtggta

SEQ ID NO: 22050 - RNA, 20 nt, synthetic construct
  source 1..20: mol_type = other RNA
gtgatccacctgccttggcc

SEQ ID NO: 22051 - RNA, 20 nt, synthetic construct
  source 1..20: mol_type = other RNA
gagttcgagaccagcctggc

SEQ ID NO: 22052 - RNA, 20 nt, synthetic construct
  source 1..20: mol_type = other RNA
ctcacggcaacctccacctc

SEQ ID NO: 22053 - RNA, 20 nt, synthetic construct
  source 1..20: mol_type = other RNA
tcacccaccactcattcatt

SEQ ID NO: 22054 - RNA, 20 nt, synthetic construct
  source 1..20: mol_type = other RNA
cctcctgagtagctgggact

SEQ ID NO: 22055 - RNA, 20 nt, synthetic construct
  source 1..20: mol_type = other RNA
gaggctgaggtgggaggatt

SEQ ID NO: 22056 - RNA, 20 nt, synthetic construct
  source 1..20: mol_type = other RNA
gaggatcgcatgagcccagg

SEQ ID NO: 22057 - RNA, 20 nt, synthetic construct
  source 1..20: mol_type = other RNA
ggtgggggtatgtgagaggc

SEQ ID NO: 22058 - RNA, 20 nt, synthetic construct
  source 1..20: mol_type = other RNA
ccaggcctccttgggccagc

SEQ ID NO: 22059 - RNA, 20 nt, synthetic construct
  source 1..20: mol_type = other RNA
ggcaagagctattgggctgg

SEQ ID NO: 22060 - RNA, 20 nt, synthetic construct
  source 1..20: mol_type = other RNA
gtctcttcaagatgtggctg

SEQ ID NO: 22061 - RNA, 20 nt, synthetic construct
  source 1..20: mol_type = other RNA
ccacatcttgaagagacctg

SEQ ID NO: 22062 - RNA, 20 nt, synthetic construct
  source 1..20: mol_type = other RNA
gctctggaccaggcggcccc

SEQ ID NO: 22063 - RNA, 20 nt, synthetic construct
  source 1..20: mol_type = other RNA
ggctctgtcttggtgctctg

SEQ ID NO: 22064 - RNA, 20 nt, synthetic construct
  source 1..20: mol_type = other RNA
ggatgacagagcaccaagac

SEQ ID NO: 22065 - RNA, 20 nt, synthetic construct
  source 1..20: mol_type = other RNA
tcacagccacagccctactt

SEQ ID NO: 22066 - RNA, 20 nt, synthetic construct
  source 1..20: mol_type = other RNA
aggccctgctggagcttggg

SEQ ID NO: 22067 - RNA, 20 nt, synthetic construct
  source 1..20: mol_type = other RNA
agccagccacagggccccca

SEQ ID NO: 22068 - RNA, 20 nt, synthetic construct
  source 1..20: mol_type = other RNA
cccagccagaaagcgtggca

SEQ ID NO: 22069 - RNA, 20 nt, synthetic construct
  source 1..20: mol_type = other RNA
gtacctcgcaagcaccttct

SEQ ID NO: 22070 - RNA, 20 nt, synthetic construct
  source 1..20: mol_type = other RNA
gaggcgtgaggcgggtgccc

SEQ ID NO: 22071 - RNA, 20 nt, synthetic construct
  source 1..20: mol_type = other RNA
ctgtgtcacccgtttcaggt

SEQ ID NO: 22072 - RNA, 20 nt, synthetic construct
  source 1..20: mol_type = other RNA
gtggggtgaggggcttgggg

SEQ ID NO: 22073 - RNA, 20 nt, synthetic construct
  source 1..20: mol_type = other RNA
agaggggcagccacttgcca

SEQ ID NO: 22074 - RNA, 20 nt, synthetic construct
  source 1..20: mol_type = other RNA
attctagacataccccagtg

SEQ ID NO: 22075 - RNA, 20 nt, synthetic construct
  source 1..20: mol_type = other RNA
tctcagattctagacatacc

SEQ ID NO: 22076 - RNA, 20 nt, synthetic construct
  source 1..20: mol_type = other RNA
ggggtggaaagaataaaaca

SEQ ID NO: 22077 - RNA, 20 nt, synthetic construct
  source 1..20: mol_type = other RNA
attcaagttctgagaagatt

SEQ ID NO: 22078 - RNA, 20 nt, synthetic construct
  source 1..20: mol_type = other RNA
caaccagaccaatcttctca

SEQ ID NO: 22079 - RNA, 20 nt, synthetic construct
  source 1..20: mol_type = other RNA
aacttgaatctgattgtatc

SEQ ID NO: 22080 - RNA, 20 nt, synthetic construct
  source 1..20: mol_type = other RNA
ggacactccaccactgtcag

SEQ ID NO: 22081 - RNA, 20 nt, synthetic construct
  source 1..20: mol_type = other RNA
gatgaaggctaaattcctta

SEQ ID NO: 22082 - RNA, 20 nt, synthetic construct
  source 1..20: mol_type = other RNA
cttaatcgccagaggattgc

SEQ ID NO: 22083 - RNA, 20 nt, synthetic construct
  source 1..20: mol_type = other RNA
acccaggcacggtgaccagg

SEQ ID NO: 22084 - RNA, 20 nt, synthetic construct
  source 1..20: mol_type = other RNA
gcagcagaggagaagttcac

SEQ ID NO: 22085 - RNA, 20 nt, synthetic construct
  source 1..20: mol_type = other RNA
ggacttggctttgaaaggct

SEQ ID NO: 22086 - RNA, 20 nt, synthetic construct
  source 1..20: mol_type = other RNA
aggtgagaggagaggcggat

SEQ ID NO: 22087 - RNA, 20 nt, synthetic construct
  source 1..20: mol_type = other RNA
attaggcacttaccagtacc

SEQ ID NO: 22088 - RNA, 20 nt, synthetic construct
  source 1..20: mol_type = other RNA
gactgtatctttcatggaaa

SEQ ID NO: 22089 - RNA, 20 nt, synthetic construct
  source 1..20: mol_type = other RNA
gagttccgaagctacagtaa

SEQ ID NO: 22090 - RNA, 20 nt, synthetic construct
  source 1..20: mol_type = other RNA
cctcccaagtagctgggatt

SEQ ID NO: 22091 - RNA, 20 nt, synthetic construct
  source 1..20: mol_type = other RNA
cctcccaaagtgctgggact

SEQ ID NO: 22092 - RNA, 20 nt, synthetic construct
  source 1..20: mol_type = other RNA
tgacagcagtgcctgctccc

SEQ ID NO: 22093 - RNA, 20 nt, synthetic construct
  source 1..20: mol_type = other RNA
gtggtacaagcccagctaat

SEQ ID NO: 22094 - RNA, 20 nt, synthetic construct
  source 1..20: mol_type = other RNA
atttgaagctaatggacccg

SEQ ID NO: 22095 - RNA, 20 nt, synthetic construct
  source 1..20: mol_type = other RNA
tcattcaagtgctcaatacc

SEQ ID NO: 22096 - RNA, 20 nt, synthetic construct
  source 1..20: mol_type = other RNA
ctcatgaggacagcagcctc

SEQ ID NO: 22097 - RNA, 20 nt, synthetic construct
  source 1..20: mol_type = other RNA
tgcagatatcacctcctcca

SEQ ID NO: 22098 - RNA, 20 nt, synthetic construct
  source 1..20: mol_type = other RNA
ggggacttcctggaggaggt

SEQ ID NO: 22099 - RNA, 20 nt, synthetic construct
  source 1..20: mol_type = other RNA
ctcattccttatcctcactg

SEQ ID NO: 22100 - RNA, 20 nt, synthetic construct
  source 1..20: mol_type = other RNA
tgaggataaggaatgagctg

SEQ ID NO: 22101 - RNA, 20 nt, synthetic construct
  source 1..20: mol_type = other RNA
aaaaggcccaatgtgtcccc

SEQ ID NO: 22102 - RNA, 20 nt, synthetic construct
  source 1..20: mol_type = other RNA
gcacaagggacgttgtgcag

SEQ ID NO: 22103 - RNA, 20 nt, synthetic construct
  source 1..20: mol_type = other RNA
ttttcaaaccaggatagtcc

SEQ ID NO: 22104 - RNA, 20 nt, synthetic construct
  source 1..20: mol_type = other RNA
tgacccagacacaactggac

SEQ ID NO: 22105 - RNA, 20 nt, synthetic construct
  source 1..20: mol_type = other RNA
aatatagcttttctttcttt

SEQ ID NO: 22106 - RNA, 20 nt, synthetic construct
  source 1..20: mol_type = other RNA
gctggagttcagtggcacaa

SEQ ID NO: 22107 - RNA, 20 nt, synthetic construct
  source 1..20: mol_type = other RNA
tggcacaatcacagctcacc

SEQ ID NO: 22108 - RNA, 20 nt, synthetic construct
  source 1..20: mol_type = other RNA
gtggggcatgcctgtagtcc

SEQ ID NO: 22109 - RNA, 20 nt, synthetic construct
  source 1..20: mol_type = other RNA
cctccctagtagctgggact

SEQ ID NO: 22110 - RNA, 20 nt, synthetic construct
  source 1..20: mol_type = other RNA
cctcccaaagtgctaggatt

SEQ ID NO: 22111 - RNA, 20 nt, synthetic construct
  source 1..20: mol_type = other RNA
gccaccctcctctacaggca

SEQ ID NO: 22112 - RNA, 20 nt, synthetic construct
  source 1..20: mol_type = other RNA
cattgccatttgtacaatgg

SEQ ID NO: 22113 - RNA, 20 nt, synthetic construct
  source 1..20: mol_type = other RNA
gtcagcctggccctaagctc

SEQ ID NO: 22114 - RNA, 20 nt, synthetic construct
  source 1..20: mol_type = other RNA
cctggccctaagctccttcc

SEQ ID NO: 22115 - RNA, 20 nt, synthetic construct
  source 1..20: mol_type = other RNA
cctcccgagtagctgggatt

SEQ ID NO: 22116 - RNA, 20 nt, synthetic construct
  source 1..20: mol_type = other RNA
atgttcctcccacctcagcc

SEQ ID NO: 22117 - RNA, 20 nt, synthetic construct
  source 1..20: mol_type = other RNA
cctcccaaagtgctgggatt

SEQ ID NO: 22118 - RNA, 20 nt, synthetic construct
  source 1..20: mol_type = other RNA
tgcattttatatataatctc

SEQ ID NO: 22119 - RNA, 20 nt, synthetic construct
  source 1..20: mol_type = other RNA
ggagagctgatagcttgtgg

SEQ ID NO: 22120 - RNA, 20 nt, synthetic construct
  source 1..20: mol_type = other RNA
ctctccctgatcactgctcc

SEQ ID NO: 22121 - RNA, 20 nt, synthetic construct
  source 1..20: mol_type = other RNA
catcatttttacctctggac

SEQ ID NO: 22122 - RNA, 20 nt, synthetic construct
  source 1..20: mol_type = other RNA
acatttccccttttcagcat

SEQ ID NO: 22123 - RNA, 20 nt, synthetic construct
  source 1..20: mol_type = other RNA
ttattgttttcagacatttc

SEQ ID NO: 22124 - RNA, 20 nt, synthetic construct
  source 1..20: mol_type = other RNA
ctgaaaataatttaaggcca

SEQ ID NO: 22125 - RNA, 20 nt, synthetic construct
  source 1..20: mol_type = other RNA
ctgaaaaagcccctagttca

SEQ ID NO: 22126 - RNA, 20 nt, synthetic construct
  source 1..20: mol_type = other RNA
aacctcctcgggggcttccg

SEQ ID NO: 22127 - RNA, 20 nt, synthetic construct
  source 1..20: mol_type = other RNA
ccacctggagaccggaagcc

SEQ ID NO: 22128 - RNA, 20 nt, synthetic construct
  source 1..20: mol_type = other RNA
gcttctactgtgcccaggca

SEQ ID NO: 22129 - RNA, 20 nt, synthetic construct
  source 1..20: mol_type = other RNA
ggttcttagccactcacaac

SEQ ID NO: 22130 - RNA, 20 nt, synthetic construct
  source 1..20: mol_type = other RNA
tccccactcacctgttcacc

SEQ ID NO: 22131 - RNA, 20 nt, synthetic construct
  source 1..20: mol_type = other RNA
tgaggccttttcttttcttt

SEQ ID NO: 22132 - RNA, 20 nt, synthetic construct
  source 1..20: mol_type = other RNA
cctcccgagtagctgggact

SEQ ID NO: 22133 - RNA, 20 nt, synthetic construct
  source 1..20: mol_type = other RNA
aagattgagaccatcctggc

SEQ ID NO: 22134 - RNA, 20 nt, synthetic construct
  source 1..20: mol_type = other RNA
aaaagacctcactgaggccg

SEQ ID NO: 22135 - RNA, 20 nt, synthetic construct
  source 1..20: mol_type = other RNA
tgaggtcttttctgaccctc

SEQ ID NO: 22136 - RNA, 20 nt, synthetic construct
  source 1..20: mol_type = other RNA
cctcccaagtagctgtgact

SEQ ID NO: 22137 - RNA, 20 nt, synthetic construct
  source 1..20: mol_type = other RNA
ctcaccgcaacctccgcctc

SEQ ID NO: 22138 - RNA, 20 nt, synthetic construct
  source 1..20: mol_type = other RNA
acatcagcttgctttccgat

SEQ ID NO: 22139 - RNA, 20 nt, synthetic construct
  source 1..20: mol_type = other RNA
cttgctttccgatttctttg

SEQ ID NO: 22140 - RNA, 20 nt, synthetic construct
  source 1..20: mol_type = other RNA
cacccagaaggcagggattt

SEQ ID NO: 22141 - RNA, 20 nt, synthetic construct
  source 1..20: mol_type = other RNA
agtttgactccaggatctgg

SEQ ID NO: 22142 - RNA, 20 nt, synthetic construct
  source 1..20: mol_type = other RNA
caaaaggccacaggatcaga

SEQ ID NO: 22143 - RNA, 20 nt, synthetic construct
  source 1..20: mol_type = other RNA
acttcaggatttcagaggcc

SEQ ID NO: 22144 - RNA, 20 nt, synthetic construct
  source 1..20: mol_type = other RNA
gatttcagaggccgagaaca

SEQ ID NO: 22145 - RNA, 20 nt, synthetic construct
  source 1..20: mol_type = other RNA
aggccgagaacatttcggaa

SEQ ID NO: 22146 - RNA, 20 nt, synthetic construct
  source 1..20: mol_type = other RNA
tttccctatatgtaaaatgg

SEQ ID NO: 22147 - RNA, 20 nt, synthetic construct
  source 1..20: mol_type = other RNA
agtcttgaggagtaaatgag

SEQ ID NO: 22148 - RNA, 20 nt, synthetic construct
  source 1..20: mol_type = other RNA
ctggcatttcaggacccctt

SEQ ID NO: 22149 - RNA, 20 nt, synthetic construct
  source 1..20: mol_type = other RNA
gaccccttccccaggctgcg

SEQ ID NO: 22150 - RNA, 20 nt, synthetic construct
  source 1..20: mol_type = other RNA
cttcttaggaggctgaggtg

SEQ ID NO: 22151 - RNA, 20 nt, synthetic construct
  source 1..20: mol_type = other RNA
cctcctaagaagctgagacc

SEQ ID NO: 22152 - RNA, 20 nt, synthetic construct
  source 1..20: mol_type = other RNA
tctctacaaaaaacacaata

SEQ ID NO: 22153 - RNA, 20 nt, synthetic construct
  source 1..20: mol_type = other RNA
gtcctgtctgaggcccctcc

SEQ ID NO: 22154 - RNA, 20 nt, synthetic construct
  source 1..20: mol_type = other RNA
acaggacctgacttctgtgc

SEQ ID NO: 22155 - RNA, 20 nt, synthetic construct
  source 1..20: mol_type = other RNA
ccccagggtggggcagagac

SEQ ID NO: 22156 - RNA, 20 nt, synthetic construct
  source 1..20: mol_type = other RNA
gcccccaggctttccccaaa

SEQ ID NO: 22157 - RNA, 20 nt, synthetic construct
  source 1..20: mol_type = other RNA
gaggctgaggcaggaggact

SEQ ID NO: 22158 - RNA, 20 nt, synthetic construct
  source 1..20: mol_type = other RNA
cctcctgagtagctgggacc

SEQ ID NO: 22159 - RNA, 20 nt, synthetic construct
  source 1..20: mol_type = other RNA
atgggaatccccagtgacaa

SEQ ID NO: 22160 - RNA, 20 nt, synthetic construct
  source 1..20: mol_type = other RNA
caattcagctggggagggat

SEQ ID NO: 22161 - RNA, 20 nt, synthetic construct
  source 1..20: mol_type = other RNA
ctggggagggattggggagc

SEQ ID NO: 22162 - RNA, 20 nt, synthetic construct
  source 1..20: mol_type = other RNA
gggcttagttcctaagaagc

SEQ ID NO: 22163 - RNA, 20 nt, synthetic construct
  source 1..20: mol_type = other RNA
gaatgtgccggctgcctatg

SEQ ID NO: 22164 - RNA, 20 nt, synthetic construct
  source 1..20: mol_type = other RNA
ccctggcacctgcccttccc

SEQ ID NO: 22165 - RNA, 20 nt, synthetic construct
  source 1..20: mol_type = other RNA
ctagcgtcctggggccatct

SEQ ID NO: 22166 - RNA, 20 nt, synthetic construct
  source 1..20: mol_type = other RNA
atgggggccatcagctagcg

SEQ ID NO: 22167 - RNA, 20 nt, synthetic construct
  source 1..20: mol_type = other RNA
atggccccaggacgctagct

SEQ ID NO: 22168 - RNA, 20 nt, synthetic construct
  source 1..20: mol_type = other RNA
cgcatccaggctgcaggtgg

SEQ ID NO: 22169 - RNA, 20 nt, synthetic construct
  source 1..20: mol_type = other RNA
ctgggggaaggtggctgaga

SEQ ID NO: 22170 - RNA, 20 nt, synthetic construct
  source 1..20: mol_type = other RNA
ccaccttcccccagctgaag

SEQ ID NO: 22171 - RNA, 20 nt, synthetic construct
  source 1..20: mol_type = other RNA
caggaagggcaggcccagct

SEQ ID NO: 22172 - RNA, 20 nt, synthetic construct
  source 1..20: mol_type = other RNA
ccggactttgggggcccgat

SEQ ID NO: 22173 - RNA, 20 nt, synthetic construct
  source 1..20: mol_type = other RNA
ccattcatccttccattcaa

SEQ ID NO: 22174 - RNA, 20 nt, synthetic construct
  source 1..20: mol_type = other RNA
gggatttatttgttttgttt

SEQ ID NO: 22175 - RNA, 20 nt, synthetic construct
  source 1..20: mol_type = other RNA
gaatcttaaattctagtgag

SEQ ID NO: 22176 - RNA, 20 nt, synthetic construct
  source 1..20: mol_type = other RNA
acaaggtctcgctctgtcac

SEQ ID NO: 22177 - RNA, 20 nt, synthetic construct
  source 1..20: mol_type = other RNA
aaggttgagatgggaggatt

SEQ ID NO: 22178 - RNA, 20 nt, synthetic construct
  source 1..20: mol_type = other RNA
aagttcaagaccagcctggg

SEQ ID NO: 22179 - RNA, 20 nt, synthetic construct
  source 1..20: mol_type = other RNA
cctcccaagtagctggaatt

SEQ ID NO: 22180 - RNA, 20 nt, synthetic construct
  source 1..20: mol_type = other RNA
gagttcaagaccagcctggc

SEQ ID NO: 22181 - RNA, 20 nt, synthetic construct
  source 1..20: mol_type = other RNA
cctcccaaagtgctgggatt

SEQ ID NO: 22182 - RNA, 20 nt, synthetic construct
  source 1..20: mol_type = other RNA
taaaaaatcatgttgaactg

SEQ ID NO: 22183 - RNA, 20 nt, synthetic construct
  source 1..20: mol_type = other RNA
cactataatgaaataagtgt

SEQ ID NO: 22184 - RNA, 20 nt, synthetic construct
  source 1..20: mol_type = other RNA
gaccaaacttgcatgcctca

SEQ ID NO: 22185 - RNA, 20 nt, synthetic construct
  source 1..20: mol_type = other RNA
tgatgttgttctgggacaga

SEQ ID NO: 22186 - RNA, 20 nt, synthetic construct
  source 1..20: mol_type = other RNA
cacctgaccggtatccgggg

SEQ ID NO: 22187 - RNA, 20 nt, synthetic construct
  source 1..20: mol_type = other RNA
gctaaggtgagtggggcccc

SEQ ID NO: 22188 - RNA, 20 nt, synthetic construct
  source 1..20: mol_type = other RNA
gtgctgagctggggggctgc

SEQ ID NO: 22189 - RNA, 20 nt, synthetic construct
  source 1..20: mol_type = other RNA
tgtcccctgcagccagcacg

SEQ ID NO: 22190 - RNA, 20 nt, synthetic construct
  source 1..20: mol_type = other RNA
ggctgtggtgattgcttcta

SEQ ID NO: 22191 - RNA, 20 nt, synthetic construct
  source 1..20: mol_type = other RNA
agtttctttcaccacgtccc

SEQ ID NO: 22192 - RNA, 20 nt, synthetic construct
  source 1..20: mol_type = other RNA
ttattcattcctagccgctg

SEQ ID NO: 22193 - RNA, 20 nt, synthetic construct
  source 1..20: mol_type = other RNA
cttttgccggccttgtcact

SEQ ID NO: 22194 - RNA, 20 nt, synthetic construct
  source 1..20: mol_type = other RNA
tgtttcactgccaccttctg

SEQ ID NO: 22195 - RNA, 20 nt, synthetic construct
  source 1..20: mol_type = other RNA
tccgctcattacctctggga

SEQ ID NO: 22196 - RNA, 20 nt, synthetic construct
  source 1..20: mol_type = other RNA
tctggcgagtaagaagagct

SEQ ID NO: 22197 - RNA, 20 nt, synthetic construct
  source 1..20: mol_type = other RNA
cattaccagctcttcttact

SEQ ID NO: 22198 - RNA, 20 nt, synthetic construct
  source 1..20: mol_type = other RNA
taagtgaagagctctggcga

SEQ ID NO: 22199 - RNA, 20 nt, synthetic construct
  source 1..20: mol_type = other RNA
attcccaggaaagatggcat

SEQ ID NO: 22200 - RNA, 20 nt, synthetic construct
  source 1..20: mol_type = other RNA
ctcactgcaacttctgcccc

SEQ ID NO: 22201 - RNA, 20 nt, synthetic construct
  source 1..20: mol_type = other RNA
tgctccgagtagctgggatt

SEQ ID NO: 22202 - RNA, 20 nt, synthetic construct
  source 1..20: mol_type = other RNA
gagtttgagaccagcctggc

SEQ ID NO: 22203 - RNA, 20 nt, synthetic construct
  source 1..20: mol_type = other RNA
gtgatccacctgcctcggcc

SEQ ID NO: 22204 - RNA, 20 nt, synthetic construct
  source 1..20: mol_type = other RNA
tccaggtagtcgaggctgta

SEQ ID NO: 22205 - RNA, 20 nt, synthetic construct
  source 1..20: mol_type = other RNA
gagggtataggacccagcta

SEQ ID NO: 22206 - RNA, 20 nt, synthetic construct
  source 1..20: mol_type = other RNA
ccttccaagtagctgggtcc

SEQ ID NO: 22207 - RNA, 20 nt, synthetic construct
  source 1..20: mol_type = other RNA
aagcaaaaatagaatctgtc

SEQ ID NO: 22208 - RNA, 20 nt, synthetic construct
  source 1..20: mol_type = other RNA
aagggccactgtggctgtgt

SEQ ID NO: 22209 - RNA, 20 nt, synthetic construct
  source 1..20: mol_type = other RNA
gggaatccagatcacacagg

SEQ ID NO: 22210 - RNA, 20 nt, synthetic construct
  source 1..20: mol_type = other RNA
tgtgaatggaaaagtaggtg

SEQ ID NO: 22211 - RNA, 20 nt, synthetic construct
  source 1..20: mol_type = other RNA
atcaagtgtcgccttcccag

SEQ ID NO: 22212 - RNA, 20 nt, synthetic construct
  source 1..20: mol_type = other RNA
ctcactgcaagcactgcctc

SEQ ID NO: 22213 - RNA, 20 nt, synthetic construct
  source 1..20: mol_type = other RNA
cctcccaagtagctgggatt

SEQ ID NO: 22214 - RNA, 20 nt, synthetic construct
  source 1..20: mol_type = other RNA
tagagacagggcttcgccat

SEQ ID NO: 22215 - RNA, 20 nt, synthetic construct
  source 1..20: mol_type = other RNA
ccttccaaagtgctgggatt

SEQ ID NO: 22216 - RNA, 20 nt, synthetic construct
  source 1..20: mol_type = other RNA
gctgggcatggtggctcaca

SEQ ID NO: 22217 - RNA, 20 nt, synthetic construct
  source 1..20: mol_type = other RNA
gatgtgtcttataaccaata

SEQ ID NO: 22218 - RNA, 20 nt, synthetic construct
  source 1..20: mol_type = other RNA
attactctccctgtggggtg

SEQ ID NO: 22219 - RNA, 20 nt, synthetic construct
  source 1..20: mol_type = other RNA
agattgcaaaacccccatct

SEQ ID NO: 22220 - RNA, 20 nt, synthetic construct
  source 1..20: mol_type = other RNA
gctaaatcaactcacatcac

SEQ ID NO: 22221 - RNA, 20 nt, synthetic construct
  source 1..20: mol_type = other RNA
ttcactgcaactccgcctcc

SEQ ID NO: 22222 - RNA, 20 nt, synthetic construct
  source 1..20: mol_type = other RNA
cctctcaagtagctgggagt

SEQ ID NO: 22223 - RNA, 20 nt, synthetic construct
  source 1..20: mol_type = other RNA
gctggtctcaaactcccgac

SEQ ID NO: 22224 - RNA, 20 nt, synthetic construct
  source 1..20: mol_type = other RNA
aactcccttgcagggctgca

SEQ ID NO: 22225 - RNA, 20 nt, synthetic construct
  source 1..20: mol_type = other RNA
ggccatgactttgccatgat

SEQ ID NO: 22226 - RNA, 20 nt, synthetic construct
  source 1..20: mol_type = other RNA
gtgctgctgcgggtatgatt

SEQ ID NO: 22227 - RNA, 20 nt, synthetic construct
  source 1..20: mol_type = other RNA
ctgtttactcgacaccaagc

SEQ ID NO: 22228 - RNA, 20 nt, synthetic construct
  source 1..20: mol_type = other RNA
tgacactcatcatgctattt

SEQ ID NO: 22229 - RNA, 20 nt, synthetic construct
  source 1..20: mol_type = other RNA
aaccatagctaacatttagt

SEQ ID NO: 22230 - RNA, 20 nt, synthetic construct
  source 1..20: mol_type = other RNA
cattgattcatttactcctc

SEQ ID NO: 22231 - RNA, 20 nt, synthetic construct
  source 1..20: mol_type = other RNA
tttgcccatctgtaaaatgg

SEQ ID NO: 22232 - RNA, 20 nt, synthetic construct
  source 1..20: mol_type = other RNA
aagagttgagtagcttgccc

SEQ ID NO: 22233 - RNA, 20 nt, synthetic construct
  source 1..20: mol_type = other RNA
aacaacttcccaagttcaaa

SEQ ID NO: 22234 - RNA, 20 nt, synthetic construct
  source 1..20: mol_type = other RNA
ccccgtgggagtcaccacct

SEQ ID NO: 22235 - RNA, 20 nt, synthetic construct
  source 1..20: mol_type = other RNA
tgtcccctgcagcctggagg

SEQ ID NO: 22236 - RNA, 20 nt, synthetic construct
  source 1..20: mol_type = other RNA
ggctgtggtgattgcttcta

SEQ ID NO: 22237 - RNA, 20 nt, synthetic construct
  source 1..20: mol_type = other RNA
ccttccagaagccaccatcc

SEQ ID NO: 22238 - RNA, 20 nt, synthetic construct
  source 1..20: mol_type = other RNA
tgtctcccaccccgggctga

SEQ ID NO: 22239 - RNA, 20 nt, synthetic construct
  source 1..20: mol_type = other RNA
cccggggtgggagacactga

SEQ ID NO: 22240 - RNA, 20 nt, synthetic construct
  source 1..20: mol_type = other RNA
cttcttcatctgtaaagtgg

SEQ ID NO: 22241 - RNA, 20 nt, synthetic construct
  source 1..20: mol_type = other RNA
cctaatatagcatttattgg

SEQ ID NO: 22242 - RNA, 20 nt, synthetic construct
  source 1..20: mol_type = other RNA
caatttcatatggttcagcc

SEQ ID NO: 22243 - RNA, 20 nt, synthetic construct
  source 1..20: mol_type = other RNA
gtttatcttttattaagtca

SEQ ID NO: 22244 - RNA, 20 nt, synthetic construct
  source 1..20: mol_type = other RNA
ctgcagaaccataaaggaat

SEQ ID NO: 22245 - RNA, 20 nt, synthetic construct
  source 1..20: mol_type = other RNA
agccaggttagaggagagag

SEQ ID NO: 22246 - RNA, 20 nt, synthetic construct
  source 1..20: mol_type = other RNA
tgtccaggaacacctgcaac

SEQ ID NO: 22247 - RNA, 20 nt, synthetic construct
  source 1..20: mol_type = other RNA
gctgatccgtgaatcctgtt

SEQ ID NO: 22248 - RNA, 20 nt, synthetic construct
  source 1..20: mol_type = other RNA
cctgagatgatcccagctgt

SEQ ID NO: 22249 - RNA, 20 nt, synthetic construct
  source 1..20: mol_type = other RNA
agacatcccctcatctccac

SEQ ID NO: 22250 - RNA, 20 nt, synthetic construct
  source 1..20: mol_type = other RNA
gcttagagatcaggggacag

SEQ ID NO: 22251 - RNA, 20 nt, synthetic construct
  source 1..20: mol_type = other RNA
gggacaggaaagttggccat

SEQ ID NO: 22252 - RNA, 20 nt, synthetic construct
  source 1..20: mol_type = other RNA
tgcttggaagagcttccttt

SEQ ID NO: 22253 - RNA, 20 nt, synthetic construct
  source 1..20: mol_type = other RNA
ggcagccaccaagccgaaac

SEQ ID NO: 22254 - RNA, 20 nt, synthetic construct
  source 1..20: mol_type = other RNA
atgaacttgcttgacaagtc

SEQ ID NO: 22255 - RNA, 20 nt, synthetic construct
  source 1..20: mol_type = other RNA
agaacatgctgtagcgggag

SEQ ID NO: 22256 - RNA, 20 nt, synthetic construct
  source 1..20: mol_type = other RNA
catcctggcacccggcccct

SEQ ID NO: 22257 - RNA, 20 nt, synthetic construct
  source 1..20: mol_type = other RNA
ggttggcccctgcccggctg

SEQ ID NO: 22258 - RNA, 20 nt, synthetic construct
  source 1..20: mol_type = other RNA
cagagcaagatgtggttcat

SEQ ID NO: 22259 - RNA, 20 nt, synthetic construct
  source 1..20: mol_type = other RNA
agaaggcctcggggctcctg

SEQ ID NO: 22260 - RNA, 20 nt, synthetic construct
  source 1..20: mol_type = other RNA
cctcccgagtagctgggact

SEQ ID NO: 22261 - RNA, 20 nt, synthetic construct
  source 1..20: mol_type = other RNA
gtgatccacccacctcagcc

SEQ ID NO: 22262 - RNA, 20 nt, synthetic construct
  source 1..20: mol_type = other RNA
cctcccaaagtgctgggatt

SEQ ID NO: 22263 - RNA, 20 nt, synthetic construct
  source 1..20: mol_type = other RNA
tgtcttctgagtgcccggtg

SEQ ID NO: 22264 - RNA, 20 nt, synthetic construct
  source 1..20: mol_type = other RNA
aagacactgatgggcaaccc

SEQ ID NO: 22265 - RNA, 20 nt, synthetic construct
  source 1..20: mol_type = other RNA
tgcattgagtcccatagaca

SEQ ID NO: 22266 - RNA, 20 nt, synthetic construct
  source 1..20: mol_type = other RNA
tggcagctgcttttgtctat

SEQ ID NO: 22267 - RNA, 20 nt, synthetic construct
  source 1..20: mol_type = other RNA
cggggacagctccttctgtc

SEQ ID NO: 22268 - RNA, 20 nt, synthetic construct
  source 1..20: mol_type = other RNA
gtgacaccagcccaaccctc

SEQ ID NO: 22269 - RNA, 20 nt, synthetic construct
  source 1..20: mol_type = other RNA
gtggggcagcttgagggttg

SEQ ID NO: 22270 - RNA, 20 nt, synthetic construct
  source 1..20: mol_type = other RNA
acgtacagaagaatgagtct

SEQ ID NO: 22271 - RNA, 20 nt, synthetic construct
  source 1..20: mol_type = other RNA
tgccactacggaatagttgg

SEQ ID NO: 22272 - RNA, 20 nt, synthetic construct
  source 1..20: mol_type = other RNA
cctcccgaatagctgggact

SEQ ID NO: 22273 - RNA, 20 nt, synthetic construct
  source 1..20: mol_type = other RNA
cctcccaaagtgctgggatt

SEQ ID NO: 22274 - RNA, 20 nt, synthetic construct
  source 1..20: mol_type = other RNA
aaaagaggacttgagccaag

SEQ ID NO: 22275 - RNA, 20 nt, synthetic construct
  source 1..20: mol_type = other RNA
tggaaaattaattgtttggg

SEQ ID NO: 22276 - RNA, 20 nt, synthetic construct
  source 1..20: mol_type = other RNA
aggcagaggcaaacattccc

SEQ ID NO: 22277 - RNA, 20 nt, synthetic construct
  source 1..20: mol_type = other RNA
aagccccaattcaagacatc

SEQ ID NO: 22278 - RNA, 20 nt, synthetic construct
  source 1..20: mol_type = other RNA
actgatcctgtgggcactgg

SEQ ID NO: 22279 - RNA, 20 nt, synthetic construct
  source 1..20: mol_type = other RNA
ctccagctcaccagccccag

SEQ ID NO: 22280 - RNA, 20 nt, synthetic construct
  source 1..20: mol_type = other RNA
tctgattcccaagctctgct

SEQ ID NO: 22281 - RNA, 20 nt, synthetic construct
  source 1..20: mol_type = other RNA
accctcttgacacccagctc

SEQ ID NO: 22282 - RNA, 20 nt, synthetic construct
  source 1..20: mol_type = other RNA
gtgctgccatccaggttcag

SEQ ID NO: 22283 - RNA, 20 nt, synthetic construct
  source 1..20: mol_type = other RNA
cttgtaaatagctcaggtgt

SEQ ID NO: 22284 - RNA, 20 nt, synthetic construct
  source 1..20: mol_type = other RNA
gtgtcaccctgcaagggatc

SEQ ID NO: 22285 - RNA, 20 nt, synthetic construct
  source 1..20: mol_type = other RNA
agcacaccttagtgctcact

SEQ ID NO: 22286 - RNA, 20 nt, synthetic construct
  source 1..20: mol_type = other RNA
accaaaaacctggcacatgg

SEQ ID NO: 22287 - RNA, 20 nt, synthetic construct
  source 1..20: mol_type = other RNA
agcctgcagttattaacact

SEQ ID NO: 22288 - RNA, 20 nt, synthetic construct
  source 1..20: mol_type = other RNA
cctcccaagtagctgggatt

SEQ ID NO: 22289 - RNA, 20 nt, synthetic construct
  source 1..20: mol_type = other RNA
aaagtattagctcaataagt

SEQ ID NO: 22290 - RNA, 20 nt, synthetic construct
  source 1..20: mol_type = other RNA
tctcctcatttgtaaaatgg

SEQ ID NO: 22291 - RNA, 20 nt, synthetic construct
  source 1..20: mol_type = other RNA
ccatatggagagctgggaag

SEQ ID NO: 22292 - RNA, 20 nt, synthetic construct
  source 1..20: mol_type = other RNA
tatgtatttgcagaatgaat

SEQ ID NO: 22293 - RNA, 20 nt, synthetic construct
  source 1..20: mol_type = other RNA
aagtccattcctttatagga

SEQ ID NO: 22294 - RNA, 20 nt, synthetic construct
  source 1..20: mol_type = other RNA
gggcacttccggcacactgt

SEQ ID NO: 22295 - RNA, 20 nt, synthetic construct
  source 1..20: mol_type = other RNA
gtggtaaagcgctgctcgga

SEQ ID NO: 22296 - RNA, 20 nt, synthetic construct
  source 1..20: mol_type = other RNA
ggcatgatagtgcaattcca

SEQ ID NO: 22297 - RNA, 20 nt, synthetic construct
  source 1..20: mol_type = other RNA
gagggagacatttgtatgca

SEQ ID NO: 22298 - RNA, 20 nt, synthetic construct
  source 1..20: mol_type = other RNA
atttcgtagcttttctttct

SEQ ID NO: 22299 - RNA, 20 nt, synthetic construct
  source 1..20: mol_type = other RNA
tctcctcgcctgtagaaagg

SEQ ID NO: 22300 - RNA, 20 nt, synthetic construct
  source 1..20: mol_type = other RNA
cctcccgagtagctgggact

SEQ ID NO: 22301 - RNA, 20 nt, synthetic construct
  source 1..20: mol_type = other RNA
gcacatggtagaccttcatt

SEQ ID NO: 22302 - RNA, 20 nt, synthetic construct
  source 1..20: mol_type = other RNA
gcctggtttccagcttggcc

SEQ ID NO: 22303 - RNA, 20 nt, synthetic construct
  source 1..20: mol_type = other RNA
gcttttcccaccacacccca

SEQ ID NO: 22304 - RNA, 20 nt, synthetic construct
  source 1..20: mol_type = other RNA
ccacaaggttctgcctagaa

SEQ ID NO: 22305 - RNA, 20 nt, synthetic construct
  source 1..20: mol_type = other RNA
aattaagtaggcacaacact

SEQ ID NO: 22306 - RNA, 20 nt, synthetic construct
  source 1..20: mol_type = other RNA
aaaagcatttccagccaggg

SEQ ID NO: 22307 - RNA, 20 nt, synthetic construct
  source 1..20: mol_type = other RNA
caagttggcaaaacagacat

SEQ ID NO: 22308 - RNA, 20 nt, synthetic construct
  source 1..20: mol_type = other RNA
gttactcgttcttcagcaag

SEQ ID NO: 22309 - RNA, 20 nt, synthetic construct
  source 1..20: mol_type = other RNA
aagaaaaagaagctgaggaa

SEQ ID NO: 22310 - RNA, 20 nt, synthetic construct
  source 1..20: mol_type = other RNA
ccccccaacagcttcctcag

SEQ ID NO: 22311 - RNA, 20 nt, synthetic construct
  source 1..20: mol_type = other RNA
gggtgactcagaagaaaaag

SEQ ID NO: 22312 - RNA, 20 nt, synthetic construct
  source 1..20: mol_type = other RNA
cttctttttcttctgagtca

SEQ ID NO: 22313 - RNA, 20 nt, synthetic construct
  source 1..20: mol_type = other RNA
gccagctgggtttagcccga

SEQ ID NO: 22314 - RNA, 20 nt, synthetic construct
  source 1..20: mol_type = other RNA
aagccaaggccaggccatcg

SEQ ID NO: 22315 - RNA, 20 nt, synthetic construct
  source 1..20: mol_type = other RNA
cactcagtcccaatctctct

SEQ ID NO: 22316 - RNA, 20 nt, synthetic construct
  source 1..20: mol_type = other RNA
tcccaatctctcttccactc

SEQ ID NO: 22317 - RNA, 20 nt, synthetic construct
  source 1..20: mol_type = other RNA
cctgagtctggggctcccag

SEQ ID NO: 22318 - RNA, 20 nt, synthetic construct
  source 1..20: mol_type = other RNA
gctgaaaatgtctttctgca

SEQ ID NO: 22319 - RNA, 20 nt, synthetic construct
  source 1..20: mol_type = other RNA
agaccctgggctggagaacc

SEQ ID NO: 22320 - RNA, 20 nt, synthetic construct
  source 1..20: mol_type = other RNA
accctgggtgactcctgagc

SEQ ID NO: 22321 - RNA, 20 nt, synthetic construct
  source 1..20: mol_type = other RNA
ccctcagaccctgggtgact

SEQ ID NO: 22322 - RNA, 20 nt, synthetic construct
  source 1..20: mol_type = other RNA
gagtcacccagggtctgagg

SEQ ID NO: 22323 - RNA, 20 nt, synthetic construct
  source 1..20: mol_type = other RNA
ctggcccagagctgcaagtc

SEQ ID NO: 22324 - RNA, 20 nt, synthetic construct
  source 1..20: mol_type = other RNA
cagccccacttggctctttc

SEQ ID NO: 22325 - RNA, 20 nt, synthetic construct
  source 1..20: mol_type = other RNA
agcagggcttgagggggctg

SEQ ID NO: 22326 - RNA, 20 nt, synthetic construct
  source 1..20: mol_type = other RNA
tgaagtttgcggaaaggata

SEQ ID NO: 22327 - RNA, 20 nt, synthetic construct
  source 1..20: mol_type = other RNA
tgcccagaacagccacccca

SEQ ID NO: 22328 - RNA, 20 nt, synthetic construct
  source 1..20: mol_type = other RNA
tttcttatcctatacgatgc

SEQ ID NO: 22329 - RNA, 20 nt, synthetic construct
  source 1..20: mol_type = other RNA
agaagccaagtaacctgcct

SEQ ID NO: 22330 - RNA, 20 nt, synthetic construct
  source 1..20: mol_type = other RNA
accgtttccatcgttattac

SEQ ID NO: 22331 - RNA, 20 nt, synthetic construct
  source 1..20: mol_type = other RNA
gaaatggtacctgctctcat

SEQ ID NO: 22332 - RNA, 20 nt, synthetic construct
  source 1..20: mol_type = other RNA
cgtctgctaagagctcagga

SEQ ID NO: 22333 - RNA, 20 nt, synthetic construct
  source 1..20: mol_type = other RNA
caaagaagggcaggtcgacc

SEQ ID NO: 22334 - RNA, 20 nt, synthetic construct
  source 1..20: mol_type = other RNA
gctgtaagtgcaggcagagc

SEQ ID NO: 22335 - RNA, 20 nt, synthetic construct
  source 1..20: mol_type = other RNA
gagcaggctggtggagggca

SEQ ID NO: 22336 - RNA, 20 nt, synthetic construct
  source 1..20: mol_type = other RNA
gctgctggccagcaggtgtc

SEQ ID NO: 22337 - RNA, 20 nt, synthetic construct
  source 1..20: mol_type = other RNA
attcagccgcacagatgctc

SEQ ID NO: 22338 - RNA, 20 nt, synthetic construct
  source 1..20: mol_type = other RNA
ccgcacagatgctcactgca

SEQ ID NO: 22339 - RNA, 20 nt, synthetic construct
  source 1..20: mol_type = other RNA
atttgtgtggatagggtgtt

SEQ ID NO: 22340 - RNA, 20 nt, synthetic construct
  source 1..20: mol_type = other RNA
ctggatagagtggttcatgc

SEQ ID NO: 22341 - RNA, 20 nt, synthetic construct
  source 1..20: mol_type = other RNA
actggagatctgcacacaag

SEQ ID NO: 22342 - RNA, 20 nt, synthetic construct
  source 1..20: mol_type = other RNA
ttgagatcaggagtttgaga

SEQ ID NO: 22343 - RNA, 20 nt, synthetic construct
  source 1..20: mol_type = other RNA
gagtttgagaccagcctggc

SEQ ID NO: 22344 - RNA, 20 nt, synthetic construct
  source 1..20: mol_type = other RNA
gcacctgccaccatgcccag

SEQ ID NO: 22345 - RNA, 20 nt, synthetic construct
  source 1..20: mol_type = other RNA
cctcccgagtagctgggacc

SEQ ID NO: 22346 - RNA, 20 nt, synthetic construct
  source 1..20: mol_type = other RNA
cagcttttcctgtatctgcc

SEQ ID NO: 22347 - RNA, 20 nt, synthetic construct
  source 1..20: mol_type = other RNA
gtaacaggcagatacaggaa

SEQ ID NO: 22348 - RNA, 20 nt, synthetic construct
  source 1..20: mol_type = other RNA
tccatagcagagaatgaaag

SEQ ID NO: 22349 - RNA, 20 nt, synthetic construct
  source 1..20: mol_type = other RNA
gcagaggtcaccaccctctc

SEQ ID NO: 22350 - RNA, 20 nt, synthetic construct
  source 1..20: mol_type = other RNA
agaggttaagcaagccgtgc

SEQ ID NO: 22351 - RNA, 20 nt, synthetic construct
  source 1..20: mol_type = other RNA
gccacgggggttcaaatcct

SEQ ID NO: 22352 - RNA, 20 nt, synthetic construct
  source 1..20: mol_type = other RNA
agaaaagggacgaacctgca

SEQ ID NO: 22353 - RNA, 20 nt, synthetic construct
  source 1..20: mol_type = other RNA
gaggctgaggcatgagaatt

SEQ ID NO: 22354 - RNA, 20 nt, synthetic construct
  source 1..20: mol_type = other RNA
cctcctgagtagctgggact

SEQ ID NO: 22355 - RNA, 20 nt, synthetic construct
  source 1..20: mol_type = other RNA
gacggctttgactgtggccc

SEQ ID NO: 22356 - RNA, 20 nt, synthetic construct
  source 1..20: mol_type = other RNA
cctggggctcttgatgcctt

SEQ ID NO: 22357 - RNA, 20 nt, synthetic construct
  source 1..20: mol_type = other RNA
aaggttggagaacctgctgc

SEQ ID NO: 22358 - RNA, 20 nt, synthetic construct
  source 1..20: mol_type = other RNA
agcacagcagacaagttatc

SEQ ID NO: 22359 - RNA, 20 nt, synthetic construct
  source 1..20: mol_type = other RNA
aaagggggaaaaaaatctag

SEQ ID NO: 22360 - RNA, 20 nt, synthetic construct
  source 1..20: mol_type = other RNA
ccactagatttttttccccc

SEQ ID NO: 22361 - RNA, 20 nt, synthetic construct
  source 1..20: mol_type = other RNA
aatgacagttgggtgctaga

SEQ ID NO: 22362 - RNA, 20 nt, synthetic construct
  source 1..20: mol_type = other RNA
taactctgcagagaagctgc

SEQ ID NO: 22363 - RNA, 20 nt, synthetic construct
  source 1..20: mol_type = other RNA
gatgtggcttaagtaagaag

SEQ ID NO: 22364 - RNA, 20 nt, synthetic construct
  source 1..20: mol_type = other RNA
agcctcacccaccagtgcgc

SEQ ID NO: 22365 - RNA, 20 nt, synthetic construct
  source 1..20: mol_type = other RNA
ctgcccgctgtcctgctcct

SEQ ID NO: 22366 - RNA, 20 nt, synthetic construct
  source 1..20: mol_type = other RNA
cacagacaggctaaatgcag

SEQ ID NO: 22367 - RNA, 20 nt, synthetic construct
  source 1..20: mol_type = other RNA
ggcaaatgctgtgagatctg

SEQ ID NO: 22368 - RNA, 20 nt, synthetic construct
  source 1..20: mol_type = other RNA
acaagtcacccaccctctct

SEQ ID NO: 22369 - RNA, 20 nt, synthetic construct
  source 1..20: mol_type = other RNA
gcactccatggacacaaaca

SEQ ID NO: 22370 - RNA, 20 nt, synthetic construct
  source 1..20: mol_type = other RNA
tacagggtggttccttccct

SEQ ID NO: 22371 - RNA, 20 nt, synthetic construct
  source 1..20: mol_type = other RNA
aaggcccctagccttgagaa

SEQ ID NO: 22372 - RNA, 20 nt, synthetic construct
  source 1..20: mol_type = other RNA
aatggctgcgtgagtagggg

SEQ ID NO: 22373 - RNA, 20 nt, synthetic construct
  source 1..20: mol_type = other RNA
aatgaaggcatggctggggt

SEQ ID NO: 22374 - RNA, 20 nt, synthetic construct
  source 1..20: mol_type = other RNA
ggacatggacctgtgcagag

SEQ ID NO: 22375 - RNA, 20 nt, synthetic construct
  source 1..20: mol_type = other RNA
ctttggcagccaacgtgcaa

SEQ ID NO: 22376 - RNA, 20 nt, synthetic construct
  source 1..20: mol_type = other RNA
cagcgggctttgtgaagatg

SEQ ID NO: 22377 - RNA, 20 nt, synthetic construct
  source 1..20: mol_type = other RNA
ggagtcttgggcgtgaccag

SEQ ID NO: 22378 - RNA, 20 nt, synthetic construct
  source 1..20: mol_type = other RNA
ttatacaggccaagggtatc

SEQ ID NO: 22379 - RNA, 20 nt, synthetic construct
  source 1..20: mol_type = other RNA
ggccccgacaccccctgagc

SEQ ID NO: 22380 - RNA, 20 nt, synthetic construct
  source 1..20: mol_type = other RNA
ctctcagggccccgacaccc

SEQ ID NO: 22381 - RNA, 20 nt, synthetic construct
  source 1..20: mol_type = other RNA
atcagctctcagggccccga

SEQ ID NO: 22382 - RNA, 20 nt, synthetic construct
  source 1..20: mol_type = other RNA
ggggtgtcggggccctgaga

SEQ ID NO: 22383 - RNA, 20 nt, synthetic construct
  source 1..20: mol_type = other RNA
gacagcgtggccaggagccc

SEQ ID NO: 22384 - RNA, 20 nt, synthetic construct
  source 1..20: mol_type = other RNA
atacccatctatgaggtggc

SEQ ID NO: 22385 - RNA, 20 nt, synthetic construct
  source 1..20: mol_type = other RNA
tttcctccctggtctaatgg

SEQ ID NO: 22386 - RNA, 20 nt, synthetic construct
  source 1..20: mol_type = other RNA
gaggaagggcacccaaggaa

SEQ ID NO: 22387 - RNA, 20 nt, synthetic construct
  source 1..20: mol_type = other RNA
accctgaaggggctctagcc

SEQ ID NO: 22388 - RNA, 20 nt, synthetic construct
  source 1..20: mol_type = other RNA
tgtcaatggcgtgtcagacc

SEQ ID NO: 22389 - RNA, 20 nt, synthetic construct
  source 1..20: mol_type = other RNA
ggtctgacacgccattgaca

SEQ ID NO: 22390 - RNA, 20 nt, synthetic construct
  source 1..20: mol_type = other RNA
acttcatctcctaagcctcg

SEQ ID NO: 22391 - RNA, 20 nt, synthetic construct
  source 1..20: mol_type = other RNA
tttttggtcaatccttatga

SEQ ID NO: 22392 - RNA, 20 nt, synthetic construct
  source 1..20: mol_type = other RNA
tttggtgctggtatatctta

SEQ ID NO: 22393 - RNA, 20 nt, synthetic construct
  source 1..20: mol_type = other RNA
ttggtgaaggtggtgtctgc

SEQ ID NO: 22394 - RNA, 20 nt, synthetic construct
  source 1..20: mol_type = other RNA
tgcatcttatcgagaggcac

SEQ ID NO: 22395 - RNA, 20 nt, synthetic construct
  source 1..20: mol_type = other RNA
atgaggcattcttggcagga

SEQ ID NO: 22396 - RNA, 20 nt, synthetic construct
  source 1..20: mol_type = other RNA
acaaacccaaattgagagac

SEQ ID NO: 22397 - RNA, 20 nt, synthetic construct
  source 1..20: mol_type = other RNA
tctgtctttctctcttgtga

SEQ ID NO: 22398 - RNA, 20 nt, synthetic construct
  source 1..20: mol_type = other RNA
ctcttcagtctgtctttctc

SEQ ID NO: 22399 - RNA, 20 nt, synthetic construct
  source 1..20: mol_type = other RNA
tctggatcagctcttcagtc

SEQ ID NO: 22400 - RNA, 20 nt, synthetic construct
  source 1..20: mol_type = other RNA
cttttgcattaatctcgagc

SEQ ID NO: 22401 - RNA, 20 nt, synthetic construct
  source 1..20: mol_type = other RNA
tcacccaggctggagtgcag

SEQ ID NO: 22402 - RNA, 20 nt, synthetic construct
  source 1..20: mol_type = other RNA
gcaggaggattgcttgagtc

SEQ ID NO: 22403 - RNA, 20 nt, synthetic construct
  source 1..20: mol_type = other RNA
cctctataaaatttgaataa

SEQ ID NO: 22404 - RNA, 20 nt, synthetic construct
  source 1..20: mol_type = other RNA
caaatctaatattgatacac

SEQ ID NO: 22405 - RNA, 20 nt, synthetic construct
  source 1..20: mol_type = other RNA
tatttatttccttagaacaa

SEQ ID NO: 22406 - RNA, 20 nt, synthetic construct
  source 1..20: mol_type = other RNA
gaaaaagttggaagagtgcg

SEQ ID NO: 22407 - RNA, 20 nt, synthetic construct
  source 1..20: mol_type = other RNA
tgctgtggccagggaaccgg

SEQ ID NO: 22408 - RNA, 20 nt, synthetic construct
  source 1..20: mol_type = other RNA
aagttctgggaggaaagcta

SEQ ID NO: 22409 - RNA, 20 nt, synthetic construct
  source 1..20: mol_type = other RNA
ccaagaaacaggcagggtct

SEQ ID NO: 22410 - RNA, 20 nt, synthetic construct
  source 1..20: mol_type = other RNA
ggctaagagagcaggactct

SEQ ID NO: 22411 - RNA, 20 nt, synthetic construct
  source 1..20: mol_type = other RNA
acaggagaaaaccccagtat

SEQ ID NO: 22412 - RNA, 20 nt, synthetic construct
  source 1..20: mol_type = other RNA
gagcagagctggagaggtgg

SEQ ID NO: 22413 - RNA, 20 nt, synthetic construct
  source 1..20: mol_type = other RNA
ggcggatgcaggaaaccagg

SEQ ID NO: 22414 - RNA, 20 nt, synthetic construct
  source 1..20: mol_type = other RNA
atttgagttatgggagatcc

SEQ ID NO: 22415 - RNA, 20 nt, synthetic construct
  source 1..20: mol_type = other RNA
aaacccaaaccttccacagg

SEQ ID NO: 22416 - RNA, 20 nt, synthetic construct
  source 1..20: mol_type = other RNA
cagaacccctgtgccggaca

SEQ ID NO: 22417 - RNA, 20 nt, synthetic construct
  source 1..20: mol_type = other RNA
ttatctcccaactaggaacc

SEQ ID NO: 22418 - RNA, 20 nt, synthetic construct
  source 1..20: mol_type = other RNA
atttggagctgagggttatc

SEQ ID NO: 22419 - RNA, 20 nt, synthetic construct
  source 1..20: mol_type = other RNA
cttgtcctggtgcagctcag

SEQ ID NO: 22420 - RNA, 20 nt, synthetic construct
  source 1..20: mol_type = other RNA
ctccaaatctgagctgcacc

SEQ ID NO: 22421 - RNA, 20 nt, synthetic construct
  source 1..20: mol_type = other RNA
ctcgctgtgtgccaagagag

SEQ ID NO: 22422 - RNA, 20 nt, synthetic construct
  source 1..20: mol_type = other RNA
ttggattattcgtcccggtt

SEQ ID NO: 22423 - RNA, 20 nt, synthetic construct
  source 1..20: mol_type = other RNA
gcagcctgtcctcttctgct

SEQ ID NO: 22424 - RNA, 20 nt, synthetic construct
  source 1..20: mol_type = other RNA
ttcctcaaacatttgctgag

SEQ ID NO: 22425 - RNA, 20 nt, synthetic construct
  source 1..20: mol_type = other RNA
caaatgtttgaggaactgaa

SEQ ID NO: 22426 - RNA, 20 nt, synthetic construct
  source 1..20: mol_type = other RNA
ccattctcatgtggtcacat

SEQ ID NO: 22427 - RNA, 20 nt, synthetic construct
  source 1..20: mol_type = other RNA
tcctgctctttctcagccat

SEQ ID NO: 22428 - RNA, 20 nt, synthetic construct
  source 1..20: mol_type = other RNA
atcatcttgaggtctttcct

SEQ ID NO: 22429 - RNA, 20 nt, synthetic construct
  source 1..20: mol_type = other RNA
aaccccagggtatgagaggg

SEQ ID NO: 22430 - RNA, 20 nt, synthetic construct
  source 1..20: mol_type = other RNA
ggcctgaccctgggaagtgg

SEQ ID NO: 22431 - RNA, 20 nt, synthetic construct
  source 1..20: mol_type = other RNA
ggacacccttgcaaagctct

SEQ ID NO: 22432 - RNA, 20 nt, synthetic construct
  source 1..20: mol_type = other RNA
gccctgacaccccgagagct

SEQ ID NO: 22433 - RNA, 20 nt, synthetic construct
  source 1..20: mol_type = other RNA
tttttagttcagaatatgcc

SEQ ID NO: 22434 - RNA, 20 nt, synthetic construct
  source 1..20: mol_type = other RNA
aatatgccaatgttttcatt

SEQ ID NO: 22435 - RNA, 20 nt, synthetic construct
  source 1..20: mol_type = other RNA
tacagattttgaatggattc

SEQ ID NO: 22436 - RNA, 20 nt, synthetic construct
  source 1..20: mol_type = other RNA
tctgttcatgtttctctatc

SEQ ID NO: 22437 - RNA, 20 nt, synthetic construct
  source 1..20: mol_type = other RNA
atgctgttagttgtccaggc

SEQ ID NO: 22438 - RNA, 20 nt, synthetic construct
  source 1..20: mol_type = other RNA
ctcattctgtccacaattgc

SEQ ID NO: 22439 - RNA, 20 nt, synthetic construct
  source 1..20: mol_type = other RNA
tgaggtgggtgggagccata

SEQ ID NO: 22440 - RNA, 20 nt, synthetic construct
  source 1..20: mol_type = other RNA
gtgagagagagttggttttt

SEQ ID NO: 22441 - RNA, 20 nt, synthetic construct
  source 1..20: mol_type = other RNA
tggtgccaagaccttcaggt

SEQ ID NO: 22442 - RNA, 20 nt, synthetic construct
  source 1..20: mol_type = other RNA
cctggactgcttttctccag

SEQ ID NO: 22443 - RNA, 20 nt, synthetic construct
  source 1..20: mol_type = other RNA
agaaagcctctctaaggaga

SEQ ID NO: 22444 - RNA, 20 nt, synthetic construct
  source 1..20: mol_type = other RNA
ctcaaaagcatcatctcctt

SEQ ID NO: 22445 - RNA, 20 nt, synthetic construct
  source 1..20: mol_type = other RNA
ctaaagcagcccaccatctc

SEQ ID NO: 22446 - RNA, 20 nt, synthetic construct
  source 1..20: mol_type = other RNA
attttttcggaactatgaag

SEQ ID NO: 22447 - RNA, 20 nt, synthetic construct
  source 1..20: mol_type = other RNA
tacagtgcctggtgattgaa

SEQ ID NO: 22448 - RNA, 20 nt, synthetic construct
  source 1..20: mol_type = other RNA
taacatcttagcgagaacca

SEQ ID NO: 22449 - RNA, 20 nt, synthetic construct
  source 1..20: mol_type = other RNA
ttgagctcagtaacatctta

SEQ ID NO: 22450 - RNA, 20 nt, synthetic construct
  source 1..20: mol_type = other RNA
taggtcctaccccaccctgt

SEQ ID NO: 22451 - RNA, 20 nt, synthetic construct
  source 1..20: mol_type = other RNA
agtttcaacatatgaagttt

SEQ ID NO: 22452 - RNA, 20 nt, synthetic construct
  source 1..20: mol_type = other RNA
tctgctataacagaacacca

SEQ ID NO: 22453 - RNA, 20 nt, synthetic construct
  source 1..20: mol_type = other RNA
cctgcttgcggtgaatggca

SEQ ID NO: 22454 - RNA, 20 nt, synthetic construct
  source 1..20: mol_type = other RNA
catcccctcttcattgccac

SEQ ID NO: 22455 - RNA, 20 nt, synthetic construct
  source 1..20: mol_type = other RNA
cccctgagactggacagtac

SEQ ID NO: 22456 - RNA, 20 nt, synthetic construct
  source 1..20: mol_type = other RNA
gggctgagccaaggcgttcc

SEQ ID NO: 22457 - RNA, 20 nt, synthetic construct
  source 1..20: mol_type = other RNA
gcagctgccaggtctggtga

SEQ ID NO: 22458 - RNA, 20 nt, synthetic construct
  source 1..20: mol_type = other RNA
tgcaatgaccctgtggtgcc

SEQ ID NO: 22459 - RNA, 20 nt, synthetic construct
  source 1..20: mol_type = other RNA
ggggctcttaggtcctcggg

SEQ ID NO: 22460 - RNA, 20 nt, synthetic construct
  source 1..20: mol_type = other RNA
aactgcaggggctgccagtt

SEQ ID NO: 22461 - RNA, 20 nt, synthetic construct
  source 1..20: mol_type = other RNA
ttctgcagctcagaactgca

SEQ ID NO: 22462 - RNA, 20 nt, synthetic construct
  source 1..20: mol_type = other RNA
ggtgccccagctcatcagtt

SEQ ID NO: 22463 - RNA, 20 nt, synthetic construct
  source 1..20: mol_type = other RNA
gtttcagggtgccccagctc

SEQ ID NO: 22464 - RNA, 20 nt, synthetic construct
  source 1..20: mol_type = other RNA
aagacacagggagccaggca

SEQ ID NO: 22465 - RNA, 20 nt, synthetic construct
  source 1..20: mol_type = other RNA
ctcctcctccagtcctcatc

SEQ ID NO: 22466 - RNA, 20 nt, synthetic construct
  source 1..20: mol_type = other RNA
gcttctcctccgttcacctc

SEQ ID NO: 22467 - RNA, 20 nt, synthetic construct
  source 1..20: mol_type = other RNA
agagggcacttacaggcctc

SEQ ID NO: 22468 - RNA, 20 nt, synthetic construct
  source 1..20: mol_type = other RNA
catcgtaaaggcccgagccg

SEQ ID NO: 22469 - RNA, 20 nt, synthetic construct
  source 1..20: mol_type = other RNA
cacattgacgaagaacaggc

SEQ ID NO: 22470 - RNA, 20 nt, synthetic construct
  source 1..20: mol_type = other RNA
ccgctgcggcgcccgggcgg

SEQ ID NO: 22471 - RNA, 20 nt, synthetic construct
  source 1..20: mol_type = other RNA
gggggcccgcctcgccgccc

SEQ ID NO: 22472 - RNA, 20 nt, synthetic construct
  source 1..20: mol_type = other RNA
tgtctagggccggtcccggc

SEQ ID NO: 22473 - RNA, 20 nt, synthetic construct
  source 1..20: mol_type = other RNA
cgcgggcgttgagccggcca

SEQ ID NO: 22474 - RNA, 20 nt, synthetic construct
  source 1..20: mol_type = other RNA
acgctagggccccgaggggc

SEQ ID NO: 22475 - RNA, 20 nt, synthetic construct
  source 1..20: mol_type = other RNA
atctcaaatcgaattcgctc

SEQ ID NO: 22476 - RNA, 20 nt, synthetic construct
  source 1..20: mol_type = other RNA
tctcttttacctccccctat

SEQ ID NO: 22477 - RNA, 20 nt, synthetic construct
  source 1..20: mol_type = other RNA
gtgttccttaactctaggat

SEQ ID NO: 22478 - RNA, 20 nt, synthetic construct
  source 1..20: mol_type = other RNA
gctggatagcctccaggcca

SEQ ID NO: 22479 - RNA, 20 nt, synthetic construct
  source 1..20: mol_type = other RNA
ggagcgagagagcacagcga

SEQ ID NO: 22480 - RNA, 20 nt, synthetic construct
  source 1..20: mol_type = other RNA
aaacctcagcgccgcgcctt

SEQ ID NO: 22481 - RNA, 20 nt, synthetic construct
  source 1..20: mol_type = other RNA
agccaagcattctacaaacg

SEQ ID NO: 22482 - RNA, 20 nt, synthetic construct
  source 1..20: mol_type = other RNA
atgtcacttttaaaaaatta

SEQ ID NO: 22483 - RNA, 20 nt, synthetic construct
  source 1..20: mol_type = other RNA
ttttaaaaaattataagaac

SEQ ID NO: 22484 - RNA, 20 nt, synthetic construct
  source 1..20: mol_type = other RNA
agatgaagaaactaaggcac

SEQ ID NO: 22485 - RNA, 20 nt, synthetic construct
  source 1..20: mol_type = other RNA
gcagaaggcaggcgtttttc

SEQ ID NO: 22486 - RNA, 20 nt, synthetic construct
  source 1..20: mol_type = other RNA
catgttggccaggctggtct

SEQ ID NO: 22487 - RNA, 20 nt, synthetic construct
  source 1..20: mol_type = other RNA
ttctttctttcttttctttt

SEQ ID NO: 22488 - RNA, 20 nt, synthetic construct
  source 1..20: mol_type = other RNA
cttttcctctggcaaaacat

SEQ ID NO: 22489 - RNA, 20 nt, synthetic construct
  source 1..20: mol_type = other RNA
caccattactggtatttgct

SEQ ID NO: 22490 - RNA, 20 nt, synthetic construct
  source 1..20: mol_type = other RNA
tgtaatcttttctaagaaga

SEQ ID NO: 22491 - RNA, 20 nt, synthetic construct
  source 1..20: mol_type = other RNA
aaaatcttgccgccttccct

SEQ ID NO: 22492 - RNA, 20 nt, synthetic construct
  source 1..20: mol_type = other RNA
taaaaggcagctactcctcc

SEQ ID NO: 22493 - RNA, 20 nt, synthetic construct
  source 1..20: mol_type = other RNA
ctgtggatgctaattaaaac

SEQ ID NO: 22494 - RNA, 20 nt, synthetic construct
  source 1..20: mol_type = other RNA
atgcattactccatttgatc

SEQ ID NO: 22495 - RNA, 20 nt, synthetic construct
  source 1..20: mol_type = other RNA
ctatccctgttgtattttat

SEQ ID NO: 22496 - RNA, 20 nt, synthetic construct
  source 1..20: mol_type = other RNA
catgttggccaggctggtct

SEQ ID NO: 22497 - RNA, 20 nt, synthetic construct
  source 1..20: mol_type = other RNA
ttgaagttgggagttcaaga

SEQ ID NO: 22498 - RNA, 20 nt, synthetic construct
  source 1..20: mol_type = other RNA
tgcaacctccgcctcctggg

SEQ ID NO: 22499 - RNA, 20 nt, synthetic construct
  source 1..20: mol_type = other RNA
ttgaacccaggaggcggagg

SEQ ID NO: 22500 - RNA, 20 nt, synthetic construct
  source 1..20: mol_type = other RNA
cactgcacactgcactccag

SEQ ID NO: 22501 - RNA, 20 nt, synthetic construct
  source 1..20: mol_type = other RNA
tcaagagtctacatgatttg

SEQ ID NO: 22502 - RNA, 20 nt, synthetic construct
  source 1..20: mol_type = other RNA
tggagattgcgctgcatttt

SEQ ID NO: 22503 - RNA, 20 nt, synthetic construct
  source 1..20: mol_type = other RNA
ggtttattcttcaaaatgga

SEQ ID NO: 22504 - RNA, 20 nt, synthetic construct
  source 1..20: mol_type = other RNA
ttggggctaacttggtgtca

SEQ ID NO: 22505 - RNA, 20 nt, synthetic construct
  source 1..20: mol_type = other RNA
gtcatccagcagagaatgga

SEQ ID NO: 22506 - RNA, 20 nt, synthetic construct
  source 1..20: mol_type = other RNA
acggcaggcatactcatctt

SEQ ID NO: 22507 - RNA, 20 nt, synthetic construct
  source 1..20: mol_type = other RNA
ccccactgaaaaagatgagt

SEQ ID NO: 22508 - RNA, 20 nt, synthetic construct
  source 1..20: mol_type = other RNA
atggttcacacggcaggcat

SEQ ID NO: 22509 - RNA, 20 nt, synthetic construct
  source 1..20: mol_type = other RNA
agcccaagatagttaagtgg

SEQ ID NO: 22510 - RNA, 20 nt, synthetic construct
  source 1..20: mol_type = other RNA
tgtcctgaggactatttata

SEQ ID NO: 22511 - RNA, 20 nt, synthetic construct
  source 1..20: mol_type = other RNA
tatgtggagaacattgacag

SEQ ID NO: 22512 - RNA, 20 nt, synthetic construct
  source 1..20: mol_type = other RNA
actgttagtaaattgtagag

SEQ ID NO: 22513 - RNA, 20 nt, synthetic construct
  source 1..20: mol_type = other RNA
ctttttaaaagaagtagctg

SEQ ID NO: 22514 - RNA, 20 nt, synthetic construct
  source 1..20: mol_type = other RNA
tcccactattacccctttat

SEQ ID NO: 22515 - RNA, 20 nt, synthetic construct
  source 1..20: mol_type = other RNA
attttttaccaagtggaact

SEQ ID NO: 22516 - RNA, 20 nt, synthetic construct
  source 1..20: mol_type = other RNA
tgaggccctttacactgtga

SEQ ID NO: 22517 - RNA, 20 nt, synthetic construct
  source 1..20: mol_type = other RNA
agtgtaaagggcctcagtga

SEQ ID NO: 22518 - RNA, 20 nt, synthetic construct
  source 1..20: mol_type = other RNA
attttccagattaggaatct

SEQ ID NO: 22519 - RNA, 20 nt, synthetic construct
  source 1..20: mol_type = other RNA
cccaactatgccatttaact

SEQ ID NO: 22520 - RNA, 20 nt, synthetic construct
  source 1..20: mol_type = other RNA
ctgagtcaggatggcctgga

SEQ ID NO: 22521 - RNA, 20 nt, synthetic construct
  source 1..20: mol_type = other RNA
tatcaggctcatggagcaga

SEQ ID NO: 22522 - RNA, 20 nt, synthetic construct
  source 1..20: mol_type = other RNA
tgtggccggggcccctctcg

SEQ ID NO: 22523 - RNA, 20 nt, synthetic construct
  source 1..20: mol_type = other RNA
ttttaatcaaggagaaatga

SEQ ID NO: 22524 - RNA, 20 nt, synthetic construct
  source 1..20: mol_type = other RNA
cagtctgccttcccattgac

SEQ ID NO: 22525 - RNA, 20 nt, synthetic construct
  source 1..20: mol_type = other RNA
tagacacttggatttctcac

SEQ ID NO: 22526 - RNA, 20 nt, synthetic construct
  source 1..20: mol_type = other RNA
tgctcctgccagctcactag

SEQ ID NO: 22527 - RNA, 20 nt, synthetic construct
  source 1..20: mol_type = other RNA
tccctgagccctgacgatac

SEQ ID NO: 22528 - RNA, 20 nt, synthetic construct
  source 1..20: mol_type = other RNA
actgattgtgcctgcatcca

SEQ ID NO: 22529 - RNA, 20 nt, synthetic construct
  source 1..20: mol_type = other RNA
gcctgtaatcccagcatttt

SEQ ID NO: 22530 - RNA, 20 nt, synthetic construct
  source 1..20: mol_type = other RNA
ctgagatcagttcgacacca

SEQ ID NO: 22531 - RNA, 20 nt, synthetic construct
  source 1..20: mol_type = other RNA
gctactgcactccagtctgg

SEQ ID NO: 22532 - RNA, 20 nt, synthetic construct
  source 1..20: mol_type = other RNA
acagacacacacatgcacac

SEQ ID NO: 22533 - RNA, 20 nt, synthetic construct
  source 1..20: mol_type = other RNA
atccttggctcctccaactt

SEQ ID NO: 22534 - RNA, 20 nt, synthetic construct
  source 1..20: mol_type = other RNA
aactttctttctttttttga

SEQ ID NO: 22535 - RNA, 20 nt, synthetic construct
  source 1..20: mol_type = other RNA
ttaagcaccgcaaatggagg

SEQ ID NO: 22536 - RNA, 20 nt, synthetic construct
  source 1..20: mol_type = other RNA
agctcactacagcctccatt

SEQ ID NO: 22537 - RNA, 20 nt, synthetic construct
  source 1..20: mol_type = other RNA
tacagcctccatttgcggtg

SEQ ID NO: 22538 - RNA, 20 nt, synthetic construct
  source 1..20: mol_type = other RNA
tatgttgaccaggctgcttg

SEQ ID NO: 22539 - RNA, 20 nt, synthetic construct
  source 1..20: mol_type = other RNA
tgttattctctcaagacttg

SEQ ID NO: 22540 - RNA, 20 nt, synthetic construct
  source 1..20: mol_type = other RNA
ccctgggcagagtctgtttt

SEQ ID NO: 22541 - RNA, 20 nt, synthetic construct
  source 1..20: mol_type = other RNA
cgcttcccacctgggggacc

SEQ ID NO: 22542 - RNA, 20 nt, synthetic construct
  source 1..20: mol_type = other RNA
ccaagtggtttccatcgtct

SEQ ID NO: 22543 - RNA, 20 nt, synthetic construct
  source 1..20: mol_type = other RNA
ctaggcaaaggggcatcttt

SEQ ID NO: 22544 - RNA, 20 nt, synthetic construct
  source 1..20: mol_type = other RNA
tgccggacacttcagcccct

SEQ ID NO: 22545 - RNA, 20 nt, synthetic construct
  source 1..20: mol_type = other RNA
gtgggatcagaaataaatat

SEQ ID NO: 22546 - RNA, 20 nt, synthetic construct
  source 1..20: mol_type = other RNA
aaaaaccccacatggatgat

SEQ ID NO: 22547 - RNA, 20 nt, synthetic construct
  source 1..20: mol_type = other RNA
cactgcactccaggctgggc

SEQ ID NO: 22548 - RNA, 20 nt, synthetic construct
  source 1..20: mol_type = other RNA
tgcaacttccatctcccagg

SEQ ID NO: 22549 - RNA, 20 nt, synthetic construct
  source 1..20: mol_type = other RNA
ttgatgtcaggagttcaaga

SEQ ID NO: 22550 - RNA, 20 nt, synthetic construct
  source 1..20: mol_type = other RNA
aatatgtcccaaatacctag

SEQ ID NO: 22551 - RNA, 20 nt, synthetic construct
  source 1..20: mol_type = other RNA
tggaactttcctggggctgg

SEQ ID NO: 22552 - RNA, 20 nt, synthetic construct
  source 1..20: mol_type = other RNA
aacatctgaacaacatctat

SEQ ID NO: 22553 - RNA, 20 nt, synthetic construct
  source 1..20: mol_type = other RNA
ccatcctagctcccccttct

SEQ ID NO: 22554 - RNA, 20 nt, synthetic construct
  source 1..20: mol_type = other RNA
atggtacgtaaggagcagaa

SEQ ID NO: 22555 - RNA, 20 nt, synthetic construct
  source 1..20: mol_type = other RNA
tagagccctgggagattcgt

SEQ ID NO: 22556 - RNA, 20 nt, synthetic construct
  source 1..20: mol_type = other RNA
tgatctaagggctcagggac

SEQ ID NO: 22557 - RNA, 20 nt, synthetic construct
  source 1..20: mol_type = other RNA
gcaatgaaatcagaacaaca

SEQ ID NO: 22558 - RNA, 20 nt, synthetic construct
  source 1..20: mol_type = other RNA
atcctaagggccagatgggg

SEQ ID NO: 22559 - RNA, 20 nt, synthetic construct
  source 1..20: mol_type = other RNA
agctctggtttctcacatcc

SEQ ID NO: 22560 - RNA, 20 nt, synthetic construct
  source 1..20: mol_type = other RNA
cttctgggcttcctttcctg

SEQ ID NO: 22561 - RNA, 20 nt, synthetic construct
  source 1..20: mol_type = other RNA
ggtttctgttctctgttgct

SEQ ID NO: 22562 - RNA, 20 nt, synthetic construct
  source 1..20: mol_type = other RNA
ctgcgttccttactgtctac

SEQ ID NO: 22563 - RNA, 20 nt, synthetic construct
  source 1..20: mol_type = other RNA
cctgtcttttttttaatttt

SEQ ID NO: 22564 - RNA, 20 nt, synthetic construct
  source 1..20: mol_type = other RNA
gccactgcattccagcctgg

SEQ ID NO: 22565 - RNA, 20 nt, synthetic construct
  source 1..20: mol_type = other RNA
gcctataatcccagcatttt

SEQ ID NO: 22566 - RNA, 20 nt, synthetic construct
  source 1..20: mol_type = other RNA
ccatatatttcccatgtatt

SEQ ID NO: 22567 - RNA, 20 nt, synthetic construct
  source 1..20: mol_type = other RNA
ctatctccctattcaccgat

SEQ ID NO: 22568 - RNA, 20 nt, synthetic construct
  source 1..20: mol_type = other RNA
cgatctctttctctcccttt

SEQ ID NO: 22569 - RNA, 20 nt, synthetic construct
  source 1..20: mol_type = other RNA
caaaaagcatgagatgaaga

SEQ ID NO: 22570 - RNA, 20 nt, synthetic construct
  source 1..20: mol_type = other RNA
agctcactacagcctcaatc

SEQ ID NO: 22571 - RNA, 20 nt, synthetic construct
  source 1..20: mol_type = other RNA
tacagcctcaatctcctggg

SEQ ID NO: 22572 - RNA, 20 nt, synthetic construct
  source 1..20: mol_type = other RNA
ctctgcaagagttttttgtt

SEQ ID NO: 22573 - RNA, 20 nt, synthetic construct
  source 1..20: mol_type = other RNA
accactgcactccagcctgg

SEQ ID NO: 22574 - RNA, 20 nt, synthetic construct
  source 1..20: mol_type = other RNA
ttgcaacctccacctccccc

SEQ ID NO: 22575 - RNA, 20 nt, synthetic construct
  source 1..20: mol_type = other RNA
ctgaggtcaggaattcgaaa

SEQ ID NO: 22576 - RNA, 20 nt, synthetic construct
  source 1..20: mol_type = other RNA
catgttggccaggctggttt

SEQ ID NO: 22577 - RNA, 20 nt, synthetic construct
  source 1..20: mol_type = other RNA
gcctgtaatctcaacacttt

SEQ ID NO: 22578 - RNA, 20 nt, synthetic construct
  source 1..20: mol_type = other RNA
tcagtgctagaggttgtcat

SEQ ID NO: 22579 - RNA, 20 nt, synthetic construct
  source 1..20: mol_type = other RNA
ctgccacagctgaaatccag

SEQ ID NO: 22580 - RNA, 20 nt, synthetic construct
  source 1..20: mol_type = other RNA
ttgctctgctcagagacctg

SEQ ID NO: 22581 - RNA, 20 nt, synthetic construct
  source 1..20: mol_type = other RNA
ctgggtgactgcagctgcct

SEQ ID NO: 22582 - RNA, 20 nt, synthetic construct
  source 1..20: mol_type = other RNA
ccaggtgagagatggtagtc

SEQ ID NO: 22583 - RNA, 20 nt, synthetic construct
  source 1..20: mol_type = other RNA
tctgtcacccacgcttgagt

SEQ ID NO: 22584 - RNA, 20 nt, synthetic construct
  source 1..20: mol_type = other RNA
ccacgcttgagtgcagtggc

SEQ ID NO: 22585 - RNA, 20 nt, synthetic construct
  source 1..20: mol_type = other RNA
atgaacccgggaggtggagg

SEQ ID NO: 22586 - RNA, 20 nt, synthetic construct
  source 1..20: mol_type = other RNA
tgcaacctccacctcccggg

SEQ ID NO: 22587 - RNA, 20 nt, synthetic construct
  source 1..20: mol_type = other RNA
gcccaggctaatttttgtat

SEQ ID NO: 22588 - RNA, 20 nt, synthetic construct
  source 1..20: mol_type = other RNA
catatccgtttgttagcccc

SEQ ID NO: 22589 - RNA, 20 nt, synthetic construct
  source 1..20: mol_type = other RNA
tgttttcagaagtccccggg

SEQ ID NO: 22590 - RNA, 20 nt, synthetic construct
  source 1..20: mol_type = other RNA
ccggggacttctgaaaacag

SEQ ID NO: 22591 - RNA, 20 nt, synthetic construct
  source 1..20: mol_type = other RNA
cttacaaagaagggcatcat

SEQ ID NO: 22592 - RNA, 20 nt, synthetic construct
  source 1..20: mol_type = other RNA
acatggggaaactgaggacc

SEQ ID NO: 22593 - RNA, 20 nt, synthetic construct
  source 1..20: mol_type = other RNA
acacctgctactaagttccc

SEQ ID NO: 22594 - RNA, 20 nt, synthetic construct
  source 1..20: mol_type = other RNA
cttttttacttatctttctt

SEQ ID NO: 22595 - RNA, 20 nt, synthetic construct
  source 1..20: mol_type = other RNA
tctgttgcccaggctggagt

SEQ ID NO: 22596 - RNA, 20 nt, synthetic construct
  source 1..20: mol_type = other RNA
tgcagcctccaactcctggg

SEQ ID NO: 22597 - RNA, 20 nt, synthetic construct
  source 1..20: mol_type = other RNA
gccattctcctacatccagc

SEQ ID NO: 22598 - RNA, 20 nt, synthetic construct
  source 1..20: mol_type = other RNA
tgcaagctccgcctcctggg

SEQ ID NO: 22599 - RNA, 20 nt, synthetic construct
  source 1..20: mol_type = other RNA
tcttattgccaggctagagt

SEQ ID NO: 22600 - RNA, 20 nt, synthetic construct
  source 1..20: mol_type = other RNA
tctgctttcttgttaaatgg

SEQ ID NO: 22601 - RNA, 20 nt, synthetic construct
  source 1..20: mol_type = other RNA
tctgttttatagaaagcagc

SEQ ID NO: 22602 - RNA, 20 nt, synthetic construct
  source 1..20: mol_type = other RNA
accaagctgagacttcctcc

SEQ ID NO: 22603 - RNA, 20 nt, synthetic construct
  source 1..20: mol_type = other RNA
tttggcgggtcaccccaaac

SEQ ID NO: 22604 - RNA, 20 nt, synthetic construct
  source 1..20: mol_type = other RNA
cccaaaccatctgactacaa

SEQ ID NO: 22605 - RNA, 20 nt, synthetic construct
  source 1..20: mol_type = other RNA
aatggaaccgcactggtgcc

SEQ ID NO: 22606 - RNA, 20 nt, synthetic construct
  source 1..20: mol_type = other RNA
ttccttactgtggactgaat

SEQ ID NO: 22607 - RNA, 20 nt, synthetic construct
  source 1..20: mol_type = other RNA
caaattcagtccacagtaag

SEQ ID NO: 22608 - RNA, 20 nt, synthetic construct
  source 1..20: mol_type = other RNA
ttgtttctttgcatgttggc

SEQ ID NO: 22609 - RNA, 20 nt, synthetic construct
  source 1..20: mol_type = other RNA
cagttgggagcccgccaagc

SEQ ID NO: 22610 - RNA, 20 nt, synthetic construct
  source 1..20: mol_type = other RNA
taaccagtcaccagttggga

SEQ ID NO: 22611 - RNA, 20 nt, synthetic construct
  source 1..20: mol_type = other RNA
tagcctcatcactaaccagt

SEQ ID NO: 22612 - RNA, 20 nt, synthetic construct
  source 1..20: mol_type = other RNA
ccccatccccaattcagaat

SEQ ID NO: 22613 - RNA, 20 nt, synthetic construct
  source 1..20: mol_type = other RNA
atcttccaatggcctgcccc

SEQ ID NO: 22614 - RNA, 20 nt, synthetic construct
  source 1..20: mol_type = other RNA
taactctcagcatgctggcc

SEQ ID NO: 22615 - RNA, 20 nt, synthetic construct
  source 1..20: mol_type = other RNA
tttcccttttcaggcctgaa

SEQ ID NO: 22616 - RNA, 20 nt, synthetic construct
  source 1..20: mol_type = other RNA
tcctctgatgctggccctag

SEQ ID NO: 22617 - RNA, 20 nt, synthetic construct
  source 1..20: mol_type = other RNA
ggttggactgagttggagag

SEQ ID NO: 22618 - RNA, 20 nt, synthetic construct
  source 1..20: mol_type = other RNA
ttgcccaagtggctccctag

SEQ ID NO: 22619 - RNA, 20 nt, synthetic construct
  source 1..20: mol_type = other RNA
agtggccagccccacttcgg

SEQ ID NO: 22620 - RNA, 20 nt, synthetic construct
  source 1..20: mol_type = other RNA
tttctttctgcagcgctgag

SEQ ID NO: 22621 - RNA, 20 nt, synthetic construct
  source 1..20: mol_type = other RNA
ctaccgctgttccccgggct

SEQ ID NO: 22622 - RNA, 20 nt, synthetic construct
  source 1..20: mol_type = other RNA
acagcaagtctgggaggatg

SEQ ID NO: 22623 - RNA, 20 nt, synthetic construct
  source 1..20: mol_type = other RNA
tttccctgttgggtcatatt

SEQ ID NO: 22624 - RNA, 20 nt, synthetic construct
  source 1..20: mol_type = other RNA
ttctctacctcgctttgggg

SEQ ID NO: 22625 - RNA, 20 nt, synthetic construct
  source 1..20: mol_type = other RNA
accctctaaggagagaggct

SEQ ID NO: 22626 - RNA, 20 nt, synthetic construct
  source 1..20: mol_type = other RNA
tccggagaagtatttattta

SEQ ID NO: 22627 - RNA, 20 nt, synthetic construct
  source 1..20: mol_type = other RNA
cttgcaaacccccggctccc

SEQ ID NO: 22628 - RNA, 20 nt, synthetic construct
  source 1..20: mol_type = other RNA
ctgggatgatcaacctgttc

SEQ ID NO: 22629 - RNA, 20 nt, synthetic construct
  source 1..20: mol_type = other RNA
cccaggcctagccaaccggg

SEQ ID NO: 22630 - RNA, 20 nt, synthetic construct
  source 1..20: mol_type = other RNA
ccccaggcccggttggctag

SEQ ID NO: 22631 - RNA, 20 nt, synthetic construct
  source 1..20: mol_type = other RNA
ctgggatagatggtttaacc

SEQ ID NO: 22632 - RNA, 20 nt, synthetic construct
  source 1..20: mol_type = other RNA
atctgcttgctgcactgggc

SEQ ID NO: 22633 - RNA, 20 nt, synthetic construct
  source 1..20: mol_type = other RNA
ttgtcagtgtgactcaaggc

SEQ ID NO: 22634 - RNA, 20 nt, synthetic construct
  source 1..20: mol_type = other RNA
actgacaagtgacttcccct

SEQ ID NO: 22635 - RNA, 20 nt, synthetic construct
  source 1..20: mol_type = other RNA
acctgtaatcctagcacttt

SEQ ID NO: 22636 - RNA, 20 nt, synthetic construct
  source 1..20: mol_type = other RNA
ttgaacccaagaggcggagt

SEQ ID NO: 22637 - RNA, 20 nt, synthetic construct
  source 1..20: mol_type = other RNA
ttgtggttgaaaaagaaaca

SEQ ID NO: 22638 - RNA, 20 nt, synthetic construct
  source 1..20: mol_type = other RNA
gtaattctatttataggcgg

SEQ ID NO: 22639 - RNA, 20 nt, synthetic construct
  source 1..20: mol_type = other RNA
ttagcataatgtcttccagg

SEQ ID NO: 22640 - RNA, 20 nt, synthetic construct
  source 1..20: mol_type = other RNA
aatagtcaagaggtaggaac

SEQ ID NO: 22641 - RNA, 20 nt, synthetic construct
  source 1..20: mol_type = other RNA
ctgttctacaatttacctta

SEQ ID NO: 22642 - RNA, 20 nt, synthetic construct
  source 1..20: mol_type = other RNA
cagaccctcagcatagattt

SEQ ID NO: 22643 - RNA, 20 nt, synthetic construct
  source 1..20: mol_type = other RNA
cttgggaggtcaaggcagga

SEQ ID NO: 22644 - RNA, 20 nt, synthetic construct
  source 1..20: mol_type = other RNA
acctgtaaccccagcacttt

SEQ ID NO: 22645 - RNA, 20 nt, synthetic construct
  source 1..20: mol_type = other RNA
catgttgcccaggctggtct

SEQ ID NO: 22646 - RNA, 20 nt, synthetic construct
  source 1..20: mol_type = other RNA
ctgggatcaggagttcgaga

SEQ ID NO: 22647 - RNA, 20 nt, synthetic construct
  source 1..20: mol_type = other RNA
cgcaatctccgcctcctggg

SEQ ID NO: 22648 - RNA, 20 nt, synthetic construct
  source 1..20: mol_type = other RNA
tcttgttgcccaggctggag

SEQ ID NO: 22649 - RNA, 20 nt, synthetic construct
  source 1..20: mol_type = other RNA
accattgcactccagcctgg

SEQ ID NO: 22650 - RNA, 20 nt, synthetic construct
  source 1..20: mol_type = other RNA
ccccagtgattctattcagg

SEQ ID NO: 22651 - RNA, 20 nt, synthetic construct
  source 1..20: mol_type = other RNA
tgggggtgaggcccaggacg

SEQ ID NO: 22652 - RNA, 20 nt, synthetic construct
  source 1..20: mol_type = other RNA
tcacagccaagcctgccgat

SEQ ID NO: 22653 - RNA, 20 nt, synthetic construct
  source 1..20: mol_type = other RNA
agccaagcctgccgatggct

SEQ ID NO: 22654 - RNA, 20 nt, synthetic construct
  source 1..20: mol_type = other RNA
aagatcctcatcactccacc

SEQ ID NO: 22655 - RNA, 20 nt, synthetic construct
  source 1..20: mol_type = other RNA
tccaccccctaccccagcac

SEQ ID NO: 22656 - RNA, 20 nt, synthetic construct
  source 1..20: mol_type = other RNA
ccacaataactttacccttt

SEQ ID NO: 22657 - RNA, 20 nt, synthetic construct
  source 1..20: mol_type = other RNA
aggagggaacacccgaagga

SEQ ID NO: 22658 - RNA, 20 nt, synthetic construct
  source 1..20: mol_type = other RNA
aacagaggtcttagccaatc

SEQ ID NO: 22659 - RNA, 20 nt, synthetic construct
  source 1..20: mol_type = other RNA
atccctcatctacctccgtc

SEQ ID NO: 22660 - RNA, 20 nt, synthetic construct
  source 1..20: mol_type = other RNA
aagtgaaatgagtctgtgtg

SEQ ID NO: 22661 - RNA, 20 nt, synthetic construct
  source 1..20: mol_type = other RNA
acagactcatttcacttgtg

SEQ ID NO: 22662 - RNA, 20 nt, synthetic construct
  source 1..20: mol_type = other RNA
ttgtgactgagcttgtcctt

SEQ ID NO: 22663 - RNA, 20 nt, synthetic construct
  source 1..20: mol_type = other RNA
tctgttgcccaggttggagt

SEQ ID NO: 22664 - RNA, 20 nt, synthetic construct
  source 1..20: mol_type = other RNA
tgcagcctcaagctcctgag

SEQ ID NO: 22665 - RNA, 20 nt, synthetic construct
  source 1..20: mol_type = other RNA
tatgttgcccaggctggtct

SEQ ID NO: 22666 - RNA, 20 nt, synthetic construct
  source 1..20: mol_type = other RNA
acctgtaatcccagcacttt

SEQ ID NO: 22667 - RNA, 20 nt, synthetic construct
  source 1..20: mol_type = other RNA
ctttccatctgagctggcag

SEQ ID NO: 22668 - RNA, 20 nt, synthetic construct
  source 1..20: mol_type = other RNA
ccatccctcccaagccatta

SEQ ID NO: 22669 - RNA, 20 nt, synthetic construct
  source 1..20: mol_type = other RNA
aatgtctctatatagagtac

SEQ ID NO: 22670 - RNA, 20 nt, synthetic construct
  source 1..20: mol_type = other RNA
catcacaatgtctctatata

SEQ ID NO: 22671 - RNA, 20 nt, synthetic construct
  source 1..20: mol_type = other RNA
aggagacggagaggaaacta

SEQ ID NO: 22672 - RNA, 20 nt, synthetic construct
  source 1..20: mol_type = other RNA
ttcctggagtggcacgagga

SEQ ID NO: 22673 - RNA, 20 nt, synthetic construct
  source 1..20: mol_type = other RNA
tcaagactttcacttcctgg

SEQ ID NO: 22674 - RNA, 20 nt, synthetic construct
  source 1..20: mol_type = other RNA
tctccagcctgctgtttgca

SEQ ID NO: 22675 - RNA, 20 nt, synthetic construct
  source 1..20: mol_type = other RNA
cagacagcctgtggggtggc

SEQ ID NO: 22676 - RNA, 20 nt, synthetic construct
  source 1..20: mol_type = other RNA
aaagaaacaaacctctgctc

SEQ ID NO: 22677 - RNA, 20 nt, synthetic construct
  source 1..20: mol_type = other RNA
caacaatagggcctgcacag

SEQ ID NO: 22678 - RNA, 20 nt, synthetic construct
  source 1..20: mol_type = other RNA
cccatgaatcctcctttgtt

SEQ ID NO: 22679 - RNA, 20 nt, synthetic construct
  source 1..20: mol_type = other RNA
atgagggttttctcttcatt

SEQ ID NO: 22680 - RNA, 20 nt, synthetic construct
  source 1..20: mol_type = other RNA
tctgtcacccaggctgagtt

SEQ ID NO: 22681 - RNA, 20 nt, synthetic construct
  source 1..20: mol_type = other RNA
ccaggctgagttttctattt

SEQ ID NO: 22682 - RNA, 20 nt, synthetic construct
  source 1..20: mol_type = other RNA
ctgaggtcaggagtttgaga

SEQ ID NO: 22683 - RNA, 20 nt, synthetic construct
  source 1..20: mol_type = other RNA
cacgcctggccacagtttct

SEQ ID NO: 22684 - RNA, 20 nt, synthetic construct
  source 1..20: mol_type = other RNA
ggacattgttctctatggag

SEQ ID NO: 22685 - RNA, 20 nt, synthetic construct
  source 1..20: mol_type = other RNA
tgggggtgtggacaggtgaa

SEQ ID NO: 22686 - RNA, 20 nt, synthetic construct
  source 1..20: mol_type = other RNA
ctaggtgtccatcactgggg

SEQ ID NO: 22687 - RNA, 20 nt, synthetic construct
  source 1..20: mol_type = other RNA
ctgtccacacccccagtgat

SEQ ID NO: 22688 - RNA, 20 nt, synthetic construct
  source 1..20: mol_type = other RNA
cacaaataacacagcagtaa

SEQ ID NO: 22689 - RNA, 20 nt, synthetic construct
  source 1..20: mol_type = other RNA
tttgctgttttatttttgga

SEQ ID NO: 22690 - RNA, 20 nt, synthetic construct
  source 1..20: mol_type = other RNA
tgggttgttgtgacttacct

SEQ ID NO: 22691 - RNA, 20 nt, synthetic construct
  source 1..20: mol_type = other RNA
tttaggtaagtcacaacaac

SEQ ID NO: 22692 - RNA, 20 nt, synthetic construct
  source 1..20: mol_type = other RNA
aacaacccagtgacataagc

SEQ ID NO: 22693 - RNA, 20 nt, synthetic construct
  source 1..20: mol_type = other RNA
agaatcgactgcattttgtt

SEQ ID NO: 22694 - RNA, 20 nt, synthetic construct
  source 1..20: mol_type = other RNA
acagcaagtgtggaactaag

SEQ ID NO: 22695 - RNA, 20 nt, synthetic construct
  source 1..20: mol_type = other RNA
tgagctcagttccttactgg

SEQ ID NO: 22696 - RNA, 20 nt, synthetic construct
  source 1..20: mol_type = other RNA
tgagcaccccgtaagaaagt

SEQ ID NO: 22697 - RNA, 20 nt, synthetic construct
  source 1..20: mol_type = other RNA
ttttcccctctaaagctgta

SEQ ID NO: 22698 - RNA, 20 nt, synthetic construct
  source 1..20: mol_type = other RNA
gccactgcactccagcctcg

SEQ ID NO: 22699 - RNA, 20 nt, synthetic construct
  source 1..20: mol_type = other RNA
cgaggctggagtgcagtggc

SEQ ID NO: 22700 - RNA, 20 nt, synthetic construct
  source 1..20: mol_type = other RNA
tgcaacctccgcctcccagg

SEQ ID NO: 22701 - RNA, 20 nt, synthetic construct
  source 1..20: mol_type = other RNA
catgctggtcaggctggtct

SEQ ID NO: 22702 - RNA, 20 nt, synthetic construct
  source 1..20: mol_type = other RNA
gcctataatcctagcacttt

SEQ ID NO: 22703 - RNA, 20 nt, synthetic construct
  source 1..20: mol_type = other RNA
agttcagagcagtgctggag

SEQ ID NO: 22704 - RNA, 20 nt, synthetic construct
  source 1..20: mol_type = other RNA
tctcacagaggtaagaagca

SEQ ID NO: 22705 - RNA, 20 nt, synthetic construct
  source 1..20: mol_type = other RNA
agaggtaagaagcacattaa

SEQ ID NO: 22706 - RNA, 20 nt, synthetic construct
  source 1..20: mol_type = other RNA
gcatattgtactcaccatgc

SEQ ID NO: 22707 - RNA, 20 nt, synthetic construct
  source 1..20: mol_type = other RNA
catgcagaagttgtgctgcc

SEQ ID NO: 22708 - RNA, 20 nt, synthetic construct
  source 1..20: mol_type = other RNA
cccaaagctcaccatctgag

SEQ ID NO: 22709 - RNA, 20 nt, synthetic construct
  source 1..20: mol_type = other RNA
catctgagctccattcatct

SEQ ID NO: 22710 - RNA, 20 nt, synthetic construct
  source 1..20: mol_type = other RNA
ctctctctcccccgagggaa

SEQ ID NO: 22711 - RNA, 20 nt, synthetic construct
  source 1..20: mol_type = other RNA
actgcatgcaggatttgaaa

SEQ ID NO: 22712 - RNA, 20 nt, synthetic construct
  source 1..20: mol_type = other RNA
agtgtccagcaagtgccagg

SEQ ID NO: 22713 - RNA, 20 nt, synthetic construct
  source 1..20: mol_type = other RNA
cttctcccagctctcagcat

SEQ ID NO: 22714 - RNA, 20 nt, synthetic construct
  source 1..20: mol_type = other RNA
accaagatctacttgaatct

SEQ ID NO: 22715 - RNA, 20 nt, synthetic construct
  source 1..20: mol_type = other RNA
tttgtcgcccaggctggagt

SEQ ID NO: 22716 - RNA, 20 nt, synthetic construct
  source 1..20: mol_type = other RNA
tgcagcctctgcctcccagg

SEQ ID NO: 22717 - RNA, 20 nt, synthetic construct
  source 1..20: mol_type = other RNA
ttgaggtcaggagtttgaga

SEQ ID NO: 22718 - RNA, 20 nt, synthetic construct
  source 1..20: mol_type = other RNA
catgttgcccgggctggtct

SEQ ID NO: 22719 - RNA, 20 nt, synthetic construct
  source 1..20: mol_type = other RNA
ttgacctctctgaacatcag

SEQ ID NO: 22720 - RNA, 20 nt, synthetic construct
  source 1..20: mol_type = other RNA
agccagaattcagatgcaag

SEQ ID NO: 22721 - RNA, 20 nt, synthetic construct
  source 1..20: mol_type = other RNA
acgcctcagtgaaatggctt

SEQ ID NO: 22722 - RNA, 20 nt, synthetic construct
  source 1..20: mol_type = other RNA
tgaggcgtgtgaacctcctc

SEQ ID NO: 22723 - RNA, 20 nt, synthetic construct
  source 1..20: mol_type = other RNA
agtggacttctgcctccatc

SEQ ID NO: 22724 - RNA, 20 nt, synthetic construct
  source 1..20: mol_type = other RNA
ccaagaggaagtgcttaagg

SEQ ID NO: 22725 - RNA, 20 nt, synthetic construct
  source 1..20: mol_type = other RNA
cagagggcctaagatctgcg

SEQ ID NO: 22726 - RNA, 20 nt, synthetic construct
  source 1..20: mol_type = other RNA
caccactgagaagttgcctg

SEQ ID NO: 22727 - RNA, 20 nt, synthetic construct
  source 1..20: mol_type = other RNA
ccaggctggagtgcagtggt

SEQ ID NO: 22728 - RNA, 20 nt, synthetic construct
  source 1..20: mol_type = other RNA
tgcagccttgacacctcccc

SEQ ID NO: 22729 - RNA, 20 nt, synthetic construct
  source 1..20: mol_type = other RNA
cacgcccagctaagttttgt

SEQ ID NO: 22730 - RNA, 20 nt, synthetic construct
  source 1..20: mol_type = other RNA
ctcagtccaggagtttgaga

SEQ ID NO: 22731 - RNA, 20 nt, synthetic construct
  source 1..20: mol_type = other RNA
catgttgcccaggctggtct

SEQ ID NO: 22732 - RNA, 20 nt, synthetic construct
  source 1..20: mol_type = other RNA
atctgtagaaattccagcac

SEQ ID NO: 22733 - RNA, 20 nt, synthetic construct
  source 1..20: mol_type = other RNA
aaagtttgacctcggaagaa

SEQ ID NO: 22734 - RNA, 20 nt, synthetic construct
  source 1..20: mol_type = other RNA
tctcacaaacgtaagaagca

SEQ ID NO: 22735 - RNA, 20 nt, synthetic construct
  source 1..20: mol_type = other RNA
aaacgtaagaagcaaactaa

SEQ ID NO: 22736 - RNA, 20 nt, synthetic construct
  source 1..20: mol_type = other RNA
acatattatactcaccatgt

SEQ ID NO: 22737 - RNA, 20 nt, synthetic construct
  source 1..20: mol_type = other RNA
catgtagaagctgtgctgcc

SEQ ID NO: 22738 - RNA, 20 nt, synthetic construct
  source 1..20: mol_type = other RNA
gcggagcccttagcaatggg

SEQ ID NO: 22739 - RNA, 20 nt, synthetic construct
  source 1..20: mol_type = other RNA
aaggattaggggagttaagt

SEQ ID NO: 22740 - RNA, 20 nt, synthetic construct
  source 1..20: mol_type = other RNA
gatacttgccttctttccct

SEQ ID NO: 22741 - RNA, 20 nt, synthetic construct
  source 1..20: mol_type = other RNA
agatgggggatggtgggagg

SEQ ID NO: 22742 - RNA, 20 nt, synthetic construct
  source 1..20: mol_type = other RNA
tctgcagatgacaagactga

SEQ ID NO: 22743 - RNA, 20 nt, synthetic construct
  source 1..20: mol_type = other RNA
gtccttcccggggtctcagt

SEQ ID NO: 22744 - RNA, 20 nt, synthetic construct
  source 1..20: mol_type = other RNA
agggcattgggtctgccagg

SEQ ID NO: 22745 - RNA, 20 nt, synthetic construct
  source 1..20: mol_type = other RNA
acaactcattcacggagttg

SEQ ID NO: 22746 - RNA, 20 nt, synthetic construct
  source 1..20: mol_type = other RNA
ggagttgctaggatcagtct

SEQ ID NO: 22747 - RNA, 20 nt, synthetic construct
  source 1..20: mol_type = other RNA
gagatcacactgcctcaaag

SEQ ID NO: 22748 - RNA, 20 nt, synthetic construct
  source 1..20: mol_type = other RNA
actgcctcaaagaggaggca

SEQ ID NO: 22749 - RNA, 20 nt, synthetic construct
  source 1..20: mol_type = other RNA
tgctctgagagaacagattt

SEQ ID NO: 22750 - RNA, 20 nt, synthetic construct
  source 1..20: mol_type = other RNA
ccccaaccatctcccagctt

SEQ ID NO: 22751 - RNA, 20 nt, synthetic construct
  source 1..20: mol_type = other RNA
agagaatgatctttccagtc

SEQ ID NO: 22752 - RNA, 20 nt, synthetic construct
  source 1..20: mol_type = other RNA
tgcctggggagaggctcagc

SEQ ID NO: 22753 - RNA, 20 nt, synthetic construct
  source 1..20: mol_type = other RNA
gcatccacagctttcactgc

SEQ ID NO: 22754 - RNA, 20 nt, synthetic construct
  source 1..20: mol_type = other RNA
acctgtaatcccagcacttt

SEQ ID NO: 22755 - RNA, 20 nt, synthetic construct
  source 1..20: mol_type = other RNA
catgttggtcaggctggttt

SEQ ID NO: 22756 - RNA, 20 nt, synthetic construct
  source 1..20: mol_type = other RNA
ctgaggtcgggagttcgaaa

SEQ ID NO: 22757 - RNA, 20 nt, synthetic construct
  source 1..20: mol_type = other RNA
tgcaacctctgcctcccgga

SEQ ID NO: 22758 - RNA, 20 nt, synthetic construct
  source 1..20: mol_type = other RNA
tctgtcgcccaggctggagt

SEQ ID NO: 22759 - RNA, 20 nt, synthetic construct
  source 1..20: mol_type = other RNA
actgacaggttccagggatt

SEQ ID NO: 22760 - RNA, 20 nt, synthetic construct
  source 1..20: mol_type = other RNA
ctgaggtcaggagttcaaga

SEQ ID NO: 22761 - RNA, 20 nt, synthetic construct
  source 1..20: mol_type = other RNA
caccatgaccagctaatttt

SEQ ID NO: 22762 - RNA, 20 nt, synthetic construct
  source 1..20: mol_type = other RNA
tgcaacctccacctcccagt

SEQ ID NO: 22763 - RNA, 20 nt, synthetic construct
  source 1..20: mol_type = other RNA
ctactcctcatgtagcaagt

SEQ ID NO: 22764 - RNA, 20 nt, synthetic construct
  source 1..20: mol_type = other RNA
tctaaactcagctttagtgg

SEQ ID NO: 22765 - RNA, 20 nt, synthetic construct
  source 1..20: mol_type = other RNA
cagtagttcccagcagctag

SEQ ID NO: 22766 - RNA, 20 nt, synthetic construct
  source 1..20: mol_type = other RNA
atatacaatttgcccactta

SEQ ID NO: 22767 - RNA, 20 nt, synthetic construct
  source 1..20: mol_type = other RNA
cattttggccaggctgttct

SEQ ID NO: 22768 - RNA, 20 nt, synthetic construct
  source 1..20: mol_type = other RNA
ttgaggtcaggagtttgaga

SEQ ID NO: 22769 - RNA, 20 nt, synthetic construct
  source 1..20: mol_type = other RNA
tgcaacgtctgcctcccagg

SEQ ID NO: 22770 - RNA, 20 nt, synthetic construct
  source 1..20: mol_type = other RNA
ccaggctggagtgcaggggt

SEQ ID NO: 22771 - RNA, 20 nt, synthetic construct
  source 1..20: mol_type = other RNA
acaactctctgagtattccc

SEQ ID NO: 22772 - RNA, 20 nt, synthetic construct
  source 1..20: mol_type = other RNA
cccctaaagaaactccagac

SEQ ID NO: 22773 - RNA, 20 nt, synthetic construct
  source 1..20: mol_type = other RNA
atattgtatgattctattta

SEQ ID NO: 22774 - RNA, 20 nt, synthetic construct
  source 1..20: mol_type = other RNA
ttagcattttttttaaggtt

SEQ ID NO: 22775 - RNA, 20 nt, synthetic construct
  source 1..20: mol_type = other RNA
agaaggataattcaaaatag

SEQ ID NO: 22776 - RNA, 20 nt, synthetic construct
  source 1..20: mol_type = other RNA
atataccccataaatatgta

SEQ ID NO: 22777 - RNA, 20 nt, synthetic construct
  source 1..20: mol_type = other RNA
tttgcatatgagaaaactga

SEQ ID NO: 22778 - RNA, 20 nt, synthetic construct
  source 1..20: mol_type = other RNA
ttcacctctctgagcctcag

SEQ ID NO: 22779 - RNA, 20 nt, synthetic construct
  source 1..20: mol_type = other RNA
ctctctgagcctcagttttc

SEQ ID NO: 22780 - RNA, 20 nt, synthetic construct
  source 1..20: mol_type = other RNA
accagagagtcaggagaccc

SEQ ID NO: 22781 - RNA, 20 nt, synthetic construct
  source 1..20: mol_type = other RNA
tcctctcatccccagccctc

SEQ ID NO: 22782 - RNA, 20 nt, synthetic construct
  source 1..20: mol_type = other RNA
cagctgggagttgttgtagg

SEQ ID NO: 22783 - RNA, 20 nt, synthetic construct
  source 1..20: mol_type = other RNA
agggtgttggaaagaggcag

SEQ ID NO: 22784 - RNA, 20 nt, synthetic construct
  source 1..20: mol_type = other RNA
ctcacagggtgttggaaaga

SEQ ID NO: 22785 - RNA, 20 nt, synthetic construct
  source 1..20: mol_type = other RNA
agtgtgccaccatggagttg

SEQ ID NO: 22786 - RNA, 20 nt, synthetic construct
  source 1..20: mol_type = other RNA
acaacagcctgctgaactgg

SEQ ID NO: 22787 - RNA, 20 nt, synthetic construct
  source 1..20: mol_type = other RNA
cttccatgtcacacaacagc

SEQ ID NO: 22788 - RNA, 20 nt, synthetic construct
  source 1..20: mol_type = other RNA
cgatattggcataagcctcc

SEQ ID NO: 22789 - RNA, 20 nt, synthetic construct
  source 1..20: mol_type = other RNA
ccattcatcatgagccacgt

SEQ ID NO: 22790 - RNA, 20 nt, synthetic construct
  source 1..20: mol_type = other RNA
taatgaccaccaagaaaaca

SEQ ID NO: 22791 - RNA, 20 nt, synthetic construct
  source 1..20: mol_type = other RNA
aaatggggacacaacatggg

SEQ ID NO: 22792 - RNA, 20 nt, synthetic construct
  source 1..20: mol_type = other RNA
atgttttctctgcagccttc

SEQ ID NO: 22793 - RNA, 20 nt, synthetic construct
  source 1..20: mol_type = other RNA
gactgtttgtggaaggtggt

SEQ ID NO: 22794 - RNA, 20 nt, synthetic construct
  source 1..20: mol_type = other RNA
aaggagaggactgggggact

SEQ ID NO: 22795 - RNA, 20 nt, synthetic construct
  source 1..20: mol_type = other RNA
cacagtggggggctcagctg

SEQ ID NO: 22796 - RNA, 20 nt, synthetic construct
  source 1..20: mol_type = other RNA
agctgagccccccactgtgg

SEQ ID NO: 22797 - RNA, 20 nt, synthetic construct
  source 1..20: mol_type = other RNA
tggtcccactaggagactgc

SEQ ID NO: 22798 - RNA, 20 nt, synthetic construct
  source 1..20: mol_type = other RNA
ctctccccaaccctatcagt

SEQ ID NO: 22799 - RNA, 20 nt, synthetic construct
  source 1..20: mol_type = other RNA
tcacctctgccccagccagt

SEQ ID NO: 22800 - RNA, 20 nt, synthetic construct
  source 1..20: mol_type = other RNA
ctctgccccagccagtttta

SEQ ID NO: 22801 - RNA, 20 nt, synthetic construct
  source 1..20: mol_type = other RNA
ctgccagccttattcgttca

SEQ ID NO: 22802 - RNA, 20 nt, synthetic construct
  source 1..20: mol_type = other RNA
tgcctttgtctcttgcagtg

SEQ ID NO: 22803 - RNA, 20 nt, synthetic construct
  source 1..20: mol_type = other RNA
catggtagatgaatatactg

SEQ ID NO: 22804 - RNA, 20 nt, synthetic construct
  source 1..20: mol_type = other RNA
ttgtcattagcttattagtg

SEQ ID NO: 22805 - RNA, 20 nt, synthetic construct
  source 1..20: mol_type = other RNA
taataagctaatgacaagtg

SEQ ID NO: 22806 - RNA, 20 nt, synthetic construct
  source 1..20: mol_type = other RNA
atcagtatactaaaagagtg

SEQ ID NO: 22807 - RNA, 20 nt, synthetic construct
  source 1..20: mol_type = other RNA
tgtctctctcactcttttag

SEQ ID NO: 22808 - RNA, 20 nt, synthetic construct
  source 1..20: mol_type = other RNA
tcttttagtatactgatgtg

SEQ ID NO: 22809 - RNA, 20 nt, synthetic construct
  source 1..20: mol_type = other RNA
aacccctcagtgtggtgggt

SEQ ID NO: 22810 - RNA, 20 nt, synthetic construct
  source 1..20: mol_type = other RNA
agattggaaaagcaaggttc

SEQ ID NO: 22811 - RNA, 20 nt, synthetic construct
  source 1..20: mol_type = other RNA
ccctactccaaactgggctg

SEQ ID NO: 22812 - RNA, 20 nt, synthetic construct
  source 1..20: mol_type = other RNA
ctacattgggggtggagagt

SEQ ID NO: 22813 - RNA, 20 nt, synthetic construct
  source 1..20: mol_type = other RNA
accactctccacccccaatg

SEQ ID NO: 22814 - RNA, 20 nt, synthetic construct
  source 1..20: mol_type = other RNA
tgtccacggcctcccaacat

SEQ ID NO: 22815 - RNA, 20 nt, synthetic construct
  source 1..20: mol_type = other RNA
aggccctaagggtccttacc

SEQ ID NO: 22816 - RNA, 20 nt, synthetic construct
  source 1..20: mol_type = other RNA
aatatctatgtaaaaatcag

SEQ ID NO: 22817 - RNA, 20 nt, synthetic construct
  source 1..20: mol_type = other RNA
tctgttgcccaggctagagt

SEQ ID NO: 22818 - RNA, 20 nt, synthetic construct
  source 1..20: mol_type = other RNA
ttgaacctgtagggcggagg

SEQ ID NO: 22819 - RNA, 20 nt, synthetic construct
  source 1..20: mol_type = other RNA
tgcaacctccgccctacagg

SEQ ID NO: 22820 - RNA, 20 nt, synthetic construct
  source 1..20: mol_type = other RNA
acccagccaatttttgtaat

SEQ ID NO: 22821 - RNA, 20 nt, synthetic construct
  source 1..20: mol_type = other RNA
ttgagatcaggagttcgaga

SEQ ID NO: 22822 - RNA, 20 nt, synthetic construct
  source 1..20: mol_type = other RNA
acctgtaatcccagcacttt

SEQ ID NO: 22823 - RNA, 20 nt, synthetic construct
  source 1..20: mol_type = other RNA
tcatgtttaaaaaagaaaat

SEQ ID NO: 22824 - RNA, 20 nt, synthetic construct
  source 1..20: mol_type = other RNA
cctaaatctggcacctgctt

SEQ ID NO: 22825 - RNA, 20 nt, synthetic construct
  source 1..20: mol_type = other RNA
caggccattttggaagcttg

SEQ ID NO: 22826 - RNA, 20 nt, synthetic construct
  source 1..20: mol_type = other RNA
tcaccaggccattttggaag

SEQ ID NO: 22827 - RNA, 20 nt, synthetic construct
  source 1..20: mol_type = other RNA
attgctcattcacttgacac

SEQ ID NO: 22828 - RNA, 20 nt, synthetic construct
  source 1..20: mol_type = other RNA
ttgacacttattcaacccct

SEQ ID NO: 22829 - RNA, 20 nt, synthetic construct
  source 1..20: mol_type = other RNA
acactcatttatttattcat

SEQ ID NO: 22830 - RNA, 20 nt, synthetic construct
  source 1..20: mol_type = other RNA
ttatttgattatgccatcat

SEQ ID NO: 22831 - RNA, 20 nt, synthetic construct
  source 1..20: mol_type = other RNA
cattcactccaccactccct

SEQ ID NO: 22832 - RNA, 20 nt, synthetic construct
  source 1..20: mol_type = other RNA
tccaccactccctcaaataa

SEQ ID NO: 22833 - RNA, 20 nt, synthetic construct
  source 1..20: mol_type = other RNA
ttcatcattcgcttgcccct

SEQ ID NO: 22834 - RNA, 20 nt, synthetic construct
  source 1..20: mol_type = other RNA
tcacttcatcattcgcttgc

SEQ ID NO: 22835 - RNA, 20 nt, synthetic construct
  source 1..20: mol_type = other RNA
ttcatccactcactcacttc

SEQ ID NO: 22836 - RNA, 20 nt, synthetic construct
  source 1..20: mol_type = other RNA
tggtttattcccactttcca

SEQ ID NO: 22837 - RNA, 20 nt, synthetic construct
  source 1..20: mol_type = other RNA
atactggtctaagcatgtta

SEQ ID NO: 22838 - RNA, 20 nt, synthetic construct
  source 1..20: mol_type = other RNA
acaatcccaatattatcccc

SEQ ID NO: 22839 - RNA, 20 nt, synthetic construct
  source 1..20: mol_type = other RNA
catggggaggtcatgggagg

SEQ ID NO: 22840 - RNA, 20 nt, synthetic construct
  source 1..20: mol_type = other RNA
tcaccatggggaggtcatgg

SEQ ID NO: 22841 - RNA, 20 nt, synthetic construct
  source 1..20: mol_type = other RNA
tactcactcaccatggggag

SEQ ID NO: 22842 - RNA, 20 nt, synthetic construct
  source 1..20: mol_type = other RNA
taagctttttcttcgcttga

SEQ ID NO: 22843 - RNA, 20 nt, synthetic construct
  source 1..20: mol_type = other RNA
tatgttggccaggctggtct

SEQ ID NO: 22844 - RNA, 20 nt, synthetic construct
  source 1..20: mol_type = other RNA
ctgaggtcaggagttcgaga

SEQ ID NO: 22845 - RNA, 20 nt, synthetic construct
  source 1..20: mol_type = other RNA
ggcaacctccacctcctggg

SEQ ID NO: 22846 - RNA, 20 nt, synthetic construct
  source 1..20: mol_type = other RNA
tcatcgtctctcttgtttaa

SEQ ID NO: 22847 - RNA, 20 nt, synthetic construct
  source 1..20: mol_type = other RNA
tcatttccacacccattcct

SEQ ID NO: 22848 - RNA, 20 nt, synthetic construct
  source 1..20: mol_type = other RNA
ccaccactcattcattagtt

SEQ ID NO: 22849 - RNA, 20 nt, synthetic construct
  source 1..20: mol_type = other RNA
acctgtaatcccagcacttt

SEQ ID NO: 22850 - RNA, 20 nt, synthetic construct
  source 1..20: mol_type = other RNA
tattttgcccaggctggtct

SEQ ID NO: 22851 - RNA, 20 nt, synthetic construct
  source 1..20: mol_type = other RNA
aggctcaagcaatcctccca

SEQ ID NO: 22852 - RNA, 20 nt, synthetic construct
  source 1..20: mol_type = other RNA
tatgtcgcccaggctggcgt

SEQ ID NO: 22853 - RNA, 20 nt, synthetic construct
  source 1..20: mol_type = other RNA
atgtctgtggtcccagctac

SEQ ID NO: 22854 - RNA, 20 nt, synthetic construct
  source 1..20: mol_type = other RNA
agctcgctgcaacctcaacc

SEQ ID NO: 22855 - RNA, 20 nt, synthetic construct
  source 1..20: mol_type = other RNA
accactgcattccagcctgg

SEQ ID NO: 22856 - RNA, 20 nt, synthetic construct
  source 1..20: mol_type = other RNA
atacccccaccctgacacgc

SEQ ID NO: 22857 - RNA, 20 nt, synthetic construct
  source 1..20: mol_type = other RNA
tgcaggacacgtatggtgcc

SEQ ID NO: 22858 - RNA, 20 nt, synthetic construct
  source 1..20: mol_type = other RNA
gcggccgccggtgctccttg

SEQ ID NO: 22859 - RNA, 20 nt, synthetic construct
  source 1..20: mol_type = other RNA
tcgtgtctcacgcggccgcc

SEQ ID NO: 22860 - RNA, 20 nt, synthetic construct
  source 1..20: mol_type = other RNA
tgccccagcccaatagctct

SEQ ID NO: 22861 - RNA, 20 nt, synthetic construct
  source 1..20: mol_type = other RNA
agcccggccccggggccgcc

SEQ ID NO: 22862 - RNA, 20 nt, synthetic construct
  source 1..20: mol_type = other RNA
gtatgcctgggcctgctcca

SEQ ID NO: 22863 - RNA, 20 nt, synthetic construct
  source 1..20: mol_type = other RNA
agccacagccctactttgtg

SEQ ID NO: 22864 - RNA, 20 nt, synthetic construct
  source 1..20: mol_type = other RNA
gggactctatgtcggcctgc

SEQ ID NO: 22865 - RNA, 20 nt, synthetic construct
  source 1..20: mol_type = other RNA
gtctgcggatgggaactggt

SEQ ID NO: 22866 - RNA, 20 nt, synthetic construct
  source 1..20: mol_type = other RNA
gcctcctgatgcacatgtac

SEQ ID NO: 22867 - RNA, 20 nt, synthetic construct
  source 1..20: mol_type = other RNA
cccacctgaaacgggtgaca

SEQ ID NO: 22868 - RNA, 20 nt, synthetic construct
  source 1..20: mol_type = other RNA
ccgtttcaggtggggtgagg

SEQ ID NO: 22869 - RNA, 20 nt, synthetic construct
  source 1..20: mol_type = other RNA
ttgctgtgtggcaagtggct

SEQ ID NO: 22870 - RNA, 20 nt, synthetic construct
  source 1..20: mol_type = other RNA
tggggtatgtctagaatctg

SEQ ID NO: 22871 - RNA, 20 nt, synthetic construct
  source 1..20: mol_type = other RNA
tgctaaattattggcacaat

SEQ ID NO: 22872 - RNA, 20 nt, synthetic construct
  source 1..20: mol_type = other RNA
acagtggttttctttccctt

SEQ ID NO: 22873 - RNA, 20 nt, synthetic construct
  source 1..20: mol_type = other RNA
aactcacacagtggttttct

SEQ ID NO: 22874 - RNA, 20 nt, synthetic construct
  source 1..20: mol_type = other RNA
cgtgcctgggtctgaggccc

SEQ ID NO: 22875 - RNA, 20 nt, synthetic construct
  source 1..20: mol_type = other RNA
catcgagcctttcaaagcca

SEQ ID NO: 22876 - RNA, 20 nt, synthetic construct
  source 1..20: mol_type = other RNA
ctctgagtctgcacaagctt

SEQ ID NO: 22877 - RNA, 20 nt, synthetic construct
  source 1..20: mol_type = other RNA
gccatgcaggttgaggacat

SEQ ID NO: 22878 - RNA, 20 nt, synthetic construct
  source 1..20: mol_type = other RNA
tgcactcgctgcccaggcgg

SEQ ID NO: 22879 - RNA, 20 nt, synthetic construct
  source 1..20: mol_type = other RNA
ttctgttactaggtgcacaa

SEQ ID NO: 22880 - RNA, 20 nt, synthetic construct
  source 1..20: mol_type = other RNA
acattgtttgagcgcctctt

SEQ ID NO: 22881 - RNA, 20 nt, synthetic construct
  source 1..20: mol_type = other RNA
accggatgattttttaagtt

SEQ ID NO: 22882 - RNA, 20 nt, synthetic construct
  source 1..20: mol_type = other RNA
gaggcaccgcacccagacag

SEQ ID NO: 22883 - RNA, 20 nt, synthetic construct
  source 1..20: mol_type = other RNA
tgagcccttacccatgggtc

SEQ ID NO: 22884 - RNA, 20 nt, synthetic construct
  source 1..20: mol_type = other RNA
tttccagctgctggaagcta

SEQ ID NO: 22885 - RNA, 20 nt, synthetic construct
  source 1..20: mol_type = other RNA
tcattcaacagaggtattga

SEQ ID NO: 22886 - RNA, 20 nt, synthetic construct
  source 1..20: mol_type = other RNA
ctcctccaggaagtccccct

SEQ ID NO: 22887 - RNA, 20 nt, synthetic construct
  source 1..20: mol_type = other RNA
tgaagcttcagtgcagatat

SEQ ID NO: 22888 - RNA, 20 nt, synthetic construct
  source 1..20: mol_type = other RNA
cccagcaacactgcctaggg

SEQ ID NO: 22889 - RNA, 20 nt, synthetic construct
  source 1..20: mol_type = other RNA
tgaggaggggcagcccacca

SEQ ID NO: 22890 - RNA, 20 nt, synthetic construct
  source 1..20: mol_type = other RNA
ttgagcctagggaggttgag

SEQ ID NO: 22891 - RNA, 20 nt, synthetic construct
  source 1..20: mol_type = other RNA
agctcaccacagcctcaacc

SEQ ID NO: 22892 - RNA, 20 nt, synthetic construct
  source 1..20: mol_type = other RNA
cacagcctcaacctccctag

SEQ ID NO: 22893 - RNA, 20 nt, synthetic construct
  source 1..20: mol_type = other RNA
catgttgcccagtctggtct

SEQ ID NO: 22894 - RNA, 20 nt, synthetic construct
  source 1..20: mol_type = other RNA
cttccatctcaattatctca

SEQ ID NO: 22895 - RNA, 20 nt, synthetic construct
  source 1..20: mol_type = other RNA
ccaggctagaatgcagtggt

SEQ ID NO: 22896 - RNA, 20 nt, synthetic construct
  source 1..20: mol_type = other RNA
tgcaatctccacctctcggt

SEQ ID NO: 22897 - RNA, 20 nt, synthetic construct
  source 1..20: mol_type = other RNA
caggcctccgtctcctcatc

SEQ ID NO: 22898 - RNA, 20 nt, synthetic construct
  source 1..20: mol_type = other RNA
ttaacctcaccaggcctccg

SEQ ID NO: 22899 - RNA, 20 nt, synthetic construct
  source 1..20: mol_type = other RNA
ccacaagctatcagctctcc

SEQ ID NO: 22900 - RNA, 20 nt, synthetic construct
  source 1..20: mol_type = other RNA
tgctcccctgtgccccagaa

SEQ ID NO: 22901 - RNA, 20 nt, synthetic construct
  source 1..20: mol_type = other RNA
ccggctctaggctgttccac

SEQ ID NO: 22902 - RNA, 20 nt, synthetic construct
  source 1..20: mol_type = other RNA
aaccctacagggacttcgtt

SEQ ID NO: 22903 - RNA, 20 nt, synthetic construct
  source 1..20: mol_type = other RNA
ctgttcacccttatctccta

SEQ ID NO: 22904 - RNA, 20 nt, synthetic construct
  source 1..20: mol_type = other RNA
ccttatctcctacactcgct

SEQ ID NO: 22905 - RNA, 20 nt, synthetic construct
  source 1..20: mol_type = other RNA
tgagtaaagaccagaggagg

SEQ ID NO: 22906 - RNA, 20 nt, synthetic construct
  source 1..20: mol_type = other RNA
ctcctctggtctttactcag

SEQ ID NO: 22907 - RNA, 20 nt, synthetic construct
  source 1..20: mol_type = other RNA
ccaggctggagtgcagtggc

SEQ ID NO: 22908 - RNA, 20 nt, synthetic construct
  source 1..20: mol_type = other RNA
ttggacttgggaggaggagg

SEQ ID NO: 22909 - RNA, 20 nt, synthetic construct
  source 1..20: mol_type = other RNA
tgcaacctcctcctcccaag

SEQ ID NO: 22910 - RNA, 20 nt, synthetic construct
  source 1..20: mol_type = other RNA
cacatctggctaattttttg

SEQ ID NO: 22911 - RNA, 20 nt, synthetic construct
  source 1..20: mol_type = other RNA
gaggtcagaagattgagacc

SEQ ID NO: 22912 - RNA, 20 nt, synthetic construct
  source 1..20: mol_type = other RNA
cgtgttagccaggatggtct

SEQ ID NO: 22913 - RNA, 20 nt, synthetic construct
  source 1..20: mol_type = other RNA
gcctgtaatcccagcacttt

SEQ ID NO: 22914 - RNA, 20 nt, synthetic construct
  source 1..20: mol_type = other RNA
tgaggccgggtgtggtggct

SEQ ID NO: 22915 - RNA, 20 nt, synthetic construct
  source 1..20: mol_type = other RNA
agttaaaaataaaactctgg

SEQ ID NO: 22916 - RNA, 20 nt, synthetic construct
  source 1..20: mol_type = other RNA
tatgttggccaggctggtct

SEQ ID NO: 22917 - RNA, 20 nt, synthetic construct
  source 1..20: mol_type = other RNA
aaggccaggagtttgagacc

SEQ ID NO: 22918 - RNA, 20 nt, synthetic construct
  source 1..20: mol_type = other RNA
agctacttgggaggctgagg

SEQ ID NO: 22919 - RNA, 20 nt, synthetic construct
  source 1..20: mol_type = other RNA
cgcaacctccgcctcccggt

SEQ ID NO: 22920 - RNA, 20 nt, synthetic construct
  source 1..20: mol_type = other RNA
tctgtcatccaagctggact

SEQ ID NO: 22921 - RNA, 20 nt, synthetic construct
  source 1..20: mol_type = other RNA
gccactgcagtccagcttgg

SEQ ID NO: 22922 - RNA, 20 nt, synthetic construct
  source 1..20: mol_type = other RNA
cactgtatatttccatatga

SEQ ID NO: 22923 - RNA, 20 nt, synthetic construct
  source 1..20: mol_type = other RNA
cccaatcttatgggggttct

SEQ ID NO: 22924 - RNA, 20 nt, synthetic construct
  source 1..20: mol_type = other RNA
ccttaagtcttgatctcctc

SEQ ID NO: 22925 - RNA, 20 nt, synthetic construct
  source 1..20: mol_type = other RNA
tcgaattcattccgaaatgt

SEQ ID NO: 22926 - RNA, 20 nt, synthetic construct
  source 1..20: mol_type = other RNA
acagcctggatcaacattta

SEQ ID NO: 22927 - RNA, 20 nt, synthetic construct
  source 1..20: mol_type = other RNA
acagggtcacacagcctgga

SEQ ID NO: 22928 - RNA, 20 nt, synthetic construct
  source 1..20: mol_type = other RNA
accactgcactccagcctgg

SEQ ID NO: 22929 - RNA, 20 nt, synthetic construct
  source 1..20: mol_type = other RNA
tgcatcctccacctcctggg

SEQ ID NO: 22930 - RNA, 20 nt, synthetic construct
  source 1..20: mol_type = other RNA
tatgttgcccaagctggtct

SEQ ID NO: 22931 - RNA, 20 nt, synthetic construct
  source 1..20: mol_type = other RNA
agcccctcattcagccccag

SEQ ID NO: 22932 - RNA, 20 nt, synthetic construct
  source 1..20: mol_type = other RNA
agtcacagcccctcattcag

SEQ ID NO: 22933 - RNA, 20 nt, synthetic construct
  source 1..20: mol_type = other RNA
tccagatgctgcagggagga

SEQ ID NO: 22934 - RNA, 20 nt, synthetic construct
  source 1..20: mol_type = other RNA
ggccttttcctccctgcagc

SEQ ID NO: 22935 - RNA, 20 nt, synthetic construct
  source 1..20: mol_type = other RNA
agcactgcacccagatgttg

SEQ ID NO: 22936 - RNA, 20 nt, synthetic construct
  source 1..20: mol_type = other RNA
tgcagcctcgaattcctggc

SEQ ID NO: 22937 - RNA, 20 nt, synthetic construct
  source 1..20: mol_type = other RNA
tttgtccctttttttctctc

SEQ ID NO: 22938 - RNA, 20 nt, synthetic construct
  source 1..20: mol_type = other RNA
tcatgtgccagccacattga

SEQ ID NO: 22939 - RNA, 20 nt, synthetic construct
  source 1..20: mol_type = other RNA
tggggattcccatctgatgt

SEQ ID NO: 22940 - RNA, 20 nt, synthetic construct
  source 1..20: mol_type = other RNA
gaaaggatctacaacttttt

SEQ ID NO: 22941 - RNA, 20 nt, synthetic construct
  source 1..20: mol_type = other RNA
aacctcatttgctgctctca

SEQ ID NO: 22942 - RNA, 20 nt, synthetic construct
  source 1..20: mol_type = other RNA
ctgggggctccaaccaggca

SEQ ID NO: 22943 - RNA, 20 nt, synthetic construct
  source 1..20: mol_type = other RNA
tgggatgggaagggtcagat

SEQ ID NO: 22944 - RNA, 20 nt, synthetic construct
  source 1..20: mol_type = other RNA
tcagcgcatccaggctgcag

SEQ ID NO: 22945 - RNA, 20 nt, synthetic construct
  source 1..20: mol_type = other RNA
ttgagggtttccaaggactt

SEQ ID NO: 22946 - RNA, 20 nt, synthetic construct
  source 1..20: mol_type = other RNA
tcacttgagggtttccaagg

SEQ ID NO: 22947 - RNA, 20 nt, synthetic construct
  source 1..20: mol_type = other RNA
ccaggctagaatatagtgct

SEQ ID NO: 22948 - RNA, 20 nt, synthetic construct
  source 1..20: mol_type = other RNA
acctataatcccagcacttt

SEQ ID NO: 22949 - RNA, 20 nt, synthetic construct
  source 1..20: mol_type = other RNA
ctccgcttcccaaagtgctg

SEQ ID NO: 22950 - RNA, 20 nt, synthetic construct
  source 1..20: mol_type = other RNA
tcattcacctattcaatcag

SEQ ID NO: 22951 - RNA, 20 nt, synthetic construct
  source 1..20: mol_type = other RNA
ctattcaatcagccattcat

SEQ ID NO: 22952 - RNA, 20 nt, synthetic construct
  source 1..20: mol_type = other RNA
ttatgcagtcatttctttac

SEQ ID NO: 22953 - RNA, 20 nt, synthetic construct
  source 1..20: mol_type = other RNA
tcaatcatttctttacttac

SEQ ID NO: 22954 - RNA, 20 nt, synthetic construct
  source 1..20: mol_type = other RNA
tagaatttaagattcctgag

SEQ ID NO: 22955 - RNA, 20 nt, synthetic construct
  source 1..20: mol_type = other RNA
caaacattattttcattact

SEQ ID NO: 22956 - RNA, 20 nt, synthetic construct
  source 1..20: mol_type = other RNA
cccccagtataattttctgt

SEQ ID NO: 22957 - RNA, 20 nt, synthetic construct
  source 1..20: mol_type = other RNA
attgatcctcctgtatctta

SEQ ID NO: 22958 - RNA, 20 nt, synthetic construct
  source 1..20: mol_type = other RNA
ccagggtggagtgcagtggt

SEQ ID NO: 22959 - RNA, 20 nt, synthetic construct
  source 1..20: mol_type = other RNA
tgcagcctcaatctcctagg

SEQ ID NO: 22960 - RNA, 20 nt, synthetic construct
  source 1..20: mol_type = other RNA
cacgttgcccaggctggtct

SEQ ID NO: 22961 - RNA, 20 nt, synthetic construct
  source 1..20: mol_type = other RNA
tgtgcctggttcaatgggat

SEQ ID NO: 22962 - RNA, 20 nt, synthetic construct
  source 1..20: mol_type = other RNA
ctcctgggttcaagcaattc

SEQ ID NO: 22963 - RNA, 20 nt, synthetic construct
  source 1..20: mol_type = other RNA
acctcagcctcccaagtagc

SEQ ID NO: 22964 - RNA, 20 nt, synthetic construct
  source 1..20: mol_type = other RNA
ttgaggtcaggagttcaaga

SEQ ID NO: 22965 - RNA, 20 nt, synthetic construct
  source 1..20: mol_type = other RNA
caggttggccaggctggtct

SEQ ID NO: 22966 - RNA, 20 nt, synthetic construct
  source 1..20: mol_type = other RNA
aaccaaggtcttaggatggc

SEQ ID NO: 22967 - RNA, 20 nt, synthetic construct
  source 1..20: mol_type = other RNA
atggagcagggctgtgtctg

SEQ ID NO: 22968 - RNA, 20 nt, synthetic construct
  source 1..20: mol_type = other RNA
tttgacctcaaggagagttc

SEQ ID NO: 22969 - RNA, 20 nt, synthetic construct
  source 1..20: mol_type = other RNA
agcctatgacccagaactct

SEQ ID NO: 22970 - RNA, 20 nt, synthetic construct
  source 1..20: mol_type = other RNA
tgtgtccccgcagtctgtcc

SEQ ID NO: 22971 - RNA, 20 nt, synthetic construct
  source 1..20: mol_type = other RNA
tgacctgggtgcctacaaac

SEQ ID NO: 22972 - RNA, 20 nt, synthetic construct
  source 1..20: mol_type = other RNA
cttagcctgagcagggatgc

SEQ ID NO: 22973 - RNA, 20 nt, synthetic construct
  source 1..20: mol_type = other RNA
cacgtcccgctaatcctttt

SEQ ID NO: 22974 - RNA, 20 nt, synthetic construct
  source 1..20: mol_type = other RNA
cacagccctgaacaaaagga

SEQ ID NO: 22975 - RNA, 20 nt, synthetic construct
  source 1..20: mol_type = other RNA
aatgccaggttctgttatgc

SEQ ID NO: 22976 - RNA, 20 nt, synthetic construct
  source 1..20: mol_type = other RNA
ttacatgccggtcagtgttt

SEQ ID NO: 22977 - RNA, 20 nt, synthetic construct
  source 1..20: mol_type = other RNA
tgccaccttctggtaggcct

SEQ ID NO: 22978 - RNA, 20 nt, synthetic construct
  source 1..20: mol_type = other RNA
tcaaaagcaagaggtgctat

SEQ ID NO: 22979 - RNA, 20 nt, synthetic construct
  source 1..20: mol_type = other RNA
ttactgaggacaaccagagt

SEQ ID NO: 22980 - RNA, 20 nt, synthetic construct
  source 1..20: mol_type = other RNA
tccagcctgggtgacagagc

SEQ ID NO: 22981 - RNA, 20 nt, synthetic construct
  source 1..20: mol_type = other RNA
accacttcactccagcctgg

SEQ ID NO: 22982 - RNA, 20 nt, synthetic construct
  source 1..20: mol_type = other RNA
ccaggctggagtgaagtggt

SEQ ID NO: 22983 - RNA, 20 nt, synthetic construct
  source 1..20: mol_type = other RNA
tgcaacttctgccccccccc

SEQ ID NO: 22984 - RNA, 20 nt, synthetic construct
  source 1..20: mol_type = other RNA
ctgagatcaggagtttgaga

SEQ ID NO: 22985 - RNA, 20 nt, synthetic construct
  source 1..20: mol_type = other RNA
tttgggaggccgaggcaggt

SEQ ID NO: 22986 - RNA, 20 nt, synthetic construct
  source 1..20: mol_type = other RNA
gcctgtaatcctagtactca

SEQ ID NO: 22987 - RNA, 20 nt, synthetic construct
  source 1..20: mol_type = other RNA
ccaggttgtagtgcaggggt

SEQ ID NO: 22988 - RNA, 20 nt, synthetic construct
  source 1..20: mol_type = other RNA
tacagcctcgactacctgga

SEQ ID NO: 22989 - RNA, 20 nt, synthetic construct
  source 1..20: mol_type = other RNA
tgttttacaatattttattt

SEQ ID NO: 22990 - RNA, 20 nt, synthetic construct
  source 1..20: mol_type = other RNA
tgttttacaatattttattt

SEQ ID NO: 22991 - RNA, 20 nt, synthetic construct
  source 1..20: mol_type = other RNA
tacacacagccacagtggcc

SEQ ID NO: 22992 - RNA, 20 nt, synthetic construct
  source 1..20: mol_type = other RNA
acagggaggcccttgtgggt

SEQ ID NO: 22993 - RNA, 20 nt, synthetic construct
  source 1..20: mol_type = other RNA
actgaaaaactgcaaatacc

SEQ ID NO: 22994 - RNA, 20 nt, synthetic construct
  source 1..20: mol_type = other RNA
aagaggtatttgcagttttt

SEQ ID NO: 22995 - RNA, 20 nt, synthetic construct
  source 1..20: mol_type = other RNA
tttattgcccaggctaaggt

SEQ ID NO: 22996 - RNA, 20 nt, synthetic construct
  source 1..20: mol_type = other RNA
ttgaacccaggaggcagtgc

SEQ ID NO: 22997 - RNA, 20 nt, synthetic construct
  source 1..20: mol_type = other RNA
tgcaagcactgcctcctggg

SEQ ID NO: 22998 - RNA, 20 nt, synthetic construct
  source 1..20: mol_type = other RNA
acccgtaatcccagcacttt

SEQ ID NO: 22999 - RNA, 20 nt, synthetic construct
  source 1..20: mol_type = other RNA
agtttgcattttggcctcat

SEQ ID NO: 23000 - RNA, 20 nt, synthetic construct
  source 1..20: mol_type = other RNA
catttgaatatcattgagat

SEQ ID NO: 23001 - RNA, 20 nt, synthetic construct
  source 1..20: mol_type = other RNA
gggtcggccggtaccagtgc

SEQ ID NO: 23002 - RNA, 20 nt, synthetic construct
  source 1..20: mol_type = other RNA
atcacgggtcggccggtacc

SEQ ID NO: 23003 - RNA, 20 nt, synthetic construct
  source 1..20: mol_type = other RNA
tgcaactccgcctcccgagt

SEQ ID NO: 23004 - RNA, 20 nt, synthetic construct
  source 1..20: mol_type = other RNA
acccggctaattttgtattt

SEQ ID NO: 23005 - RNA, 20 nt, synthetic construct
  source 1..20: mol_type = other RNA
ctaaggtcgggagtttgaga

SEQ ID NO: 23006 - RNA, 20 nt, synthetic construct
  source 1..20: mol_type = other RNA
gcctgtaatcctaacacttt

SEQ ID NO: 23007 - RNA, 20 nt, synthetic construct
  source 1..20: mol_type = other RNA
tgatgccaacttcagctgtt

SEQ ID NO: 23008 - RNA, 20 nt, synthetic construct
  source 1..20: mol_type = other RNA
aaccagcattagtagcagtg

SEQ ID NO: 23009 - RNA, 20 nt, synthetic construct
  source 1..20: mol_type = other RNA
tgctactaatgctggttgtg

SEQ ID NO: 23010 - RNA, 20 nt, synthetic construct
  source 1..20: mol_type = other RNA
tggaccagctccagtttctg

SEQ ID NO: 23011 - RNA, 20 nt, synthetic construct
  source 1..20: mol_type = other RNA
accctctatgttaactcatg

SEQ ID NO: 23012 - RNA, 20 nt, synthetic construct
  source 1..20: mol_type = other RNA
aggaacattggtgagggtcg

SEQ ID NO: 23013 - RNA, 20 nt, synthetic construct
  source 1..20: mol_type = other RNA
caatgttcctgtgatgtagt

SEQ ID NO: 23014 - RNA, 20 nt, synthetic construct
  source 1..20: mol_type = other RNA
ataggcagtaagaggcatag

SEQ ID NO: 23015 - RNA, 20 nt, synthetic construct
  source 1..20: mol_type = other RNA
tgtttgaccacagagaagtg

SEQ ID NO: 23016 - RNA, 20 nt, synthetic construct
  source 1..20: mol_type = other RNA
cacctactgggattactgcc

SEQ ID NO: 23017 - RNA, 20 nt, synthetic construct
  source 1..20: mol_type = other RNA
cacagccctgaacaagagaa

SEQ ID NO: 23018 - RNA, 20 nt, synthetic construct
  source 1..20: mol_type = other RNA
ttattcattcctagcctcta

SEQ ID NO: 23019 - RNA, 20 nt, synthetic construct
  source 1..20: mol_type = other RNA
ccggagggacaccatgtccg

SEQ ID NO: 23020 - RNA, 20 nt, synthetic construct
  source 1..20: mol_type = other RNA
tccatcacccggagggacac

SEQ ID NO: 23021 - RNA, 20 nt, synthetic construct
  source 1..20: mol_type = other RNA
cttggggcctggcccttggg

SEQ ID NO: 23022 - RNA, 20 nt, synthetic construct
  source 1..20: mol_type = other RNA
ggctgccggggcccagcagc

SEQ ID NO: 23023 - RNA, 20 nt, synthetic construct
  source 1..20: mol_type = other RNA
actgggccacacgcctgggg

SEQ ID NO: 23024 - RNA, 20 nt, synthetic construct
  source 1..20: mol_type = other RNA
tccccaggcgtgtggcccag

SEQ ID NO: 23025 - RNA, 20 nt, synthetic construct
  source 1..20: mol_type = other RNA
ccagggttgcagattggtga

SEQ ID NO: 23026 - RNA, 20 nt, synthetic construct
  source 1..20: mol_type = other RNA
caatctgcaaccctgggtga

SEQ ID NO: 23027 - RNA, 20 nt, synthetic construct
  source 1..20: mol_type = other RNA
aaaacctcttgggtggatat

SEQ ID NO: 23028 - RNA, 20 nt, synthetic construct
  source 1..20: mol_type = other RNA
catgatgtccaatactggtt

SEQ ID NO: 23029 - RNA, 20 nt, synthetic construct
  source 1..20: mol_type = other RNA
tcacctcttctaagacgcac

SEQ ID NO: 23030 - RNA, 20 nt, synthetic construct
  source 1..20: mol_type = other RNA
ctcttctaagacgcacaggg

SEQ ID NO: 23031 - RNA, 20 nt, synthetic construct
  source 1..20: mol_type = other RNA
acagcaagtcagctgcagaa

SEQ ID NO: 23032 - RNA, 20 nt, synthetic construct
  source 1..20: mol_type = other RNA
tggggccccaggccgccctc

SEQ ID NO: 23033 - RNA, 20 nt, synthetic construct
  source 1..20: mol_type = other RNA
ggatcagcctgagatgatcc

SEQ ID NO: 23034 - RNA, 20 nt, synthetic construct
  source 1..20: mol_type = other RNA
aaggacactgcccccaaccc

SEQ ID NO: 23035 - RNA, 20 nt, synthetic construct
  source 1..20: mol_type = other RNA
tatgaagatcactgtccccc

SEQ ID NO: 23036 - RNA, 20 nt, synthetic construct
  source 1..20: mol_type = other RNA
tgtcccccagccctgtgctc

SEQ ID NO: 23037 - RNA, 20 nt, synthetic construct
  source 1..20: mol_type = other RNA
tccctctggcctggccgtgg

SEQ ID NO: 23038 - RNA, 20 nt, synthetic construct
  source 1..20: mol_type = other RNA
tgttgcccaggctggcgtgc

SEQ ID NO: 23039 - RNA, 20 nt, synthetic construct
  source 1..20: mol_type = other RNA
tgcaacctccgcctcttggg

SEQ ID NO: 23040 - RNA, 20 nt, synthetic construct
  source 1..20: mol_type = other RNA
ctgaggtcaagagtttgaga

SEQ ID NO: 23041 - RNA, 20 nt, synthetic construct
  source 1..20: mol_type = other RNA
gcttgtaatcccagcacttt

SEQ ID NO: 23042 - RNA, 20 nt, synthetic construct
  source 1..20: mol_type = other RNA
cgccccattagtgtcccatt

SEQ ID NO: 23043 - RNA, 20 nt, synthetic construct
  source 1..20: mol_type = other RNA
tacattataaatgtctcttt

SEQ ID NO: 23044 - RNA, 20 nt, synthetic construct
  source 1..20: mol_type = other RNA
aggcaggtccagggtttgag

SEQ ID NO: 23045 - RNA, 20 nt, synthetic construct
  source 1..20: mol_type = other RNA
atttattctgctcacatatc

SEQ ID NO: 23046 - RNA, 20 nt, synthetic construct
  source 1..20: mol_type = other RNA
atatctgtcatttgagcagg

SEQ ID NO: 23047 - RNA, 20 nt, synthetic construct
  source 1..20: mol_type = other RNA
ctgaagactcattcttctgt

SEQ ID NO: 23048 - RNA, 20 nt, synthetic construct
  source 1..20: mol_type = other RNA
acagtattacttctgctaca

SEQ ID NO: 23049 - RNA, 20 nt, synthetic construct
  source 1..20: mol_type = other RNA
tctgtcgcccagtctggaat

SEQ ID NO: 23050 - RNA, 20 nt, synthetic construct
  source 1..20: mol_type = other RNA
ttagcccaggaggttgaggc

SEQ ID NO: 23051 - RNA, 20 nt, synthetic construct
  source 1..20: mol_type = other RNA
ggctcactgcagcctcaacc

SEQ ID NO: 23052 - RNA, 20 nt, synthetic construct
  source 1..20: mol_type = other RNA
tgcagcctcaacctcctggg

SEQ ID NO: 23053 - RNA, 20 nt, synthetic construct
  source 1..20: mol_type = other RNA
acctgtagtcccagctattc

SEQ ID NO: 23054 - RNA, 20 nt, synthetic construct
  source 1..20: mol_type = other RNA
caagcccagttaatctttag

SEQ ID NO: 23055 - RNA, 20 nt, synthetic construct
  source 1..20: mol_type = other RNA
ttgaggccaggagttcaaga

SEQ ID NO: 23056 - RNA, 20 nt, synthetic construct
  source 1..20: mol_type = other RNA
tatgttgcccaggcaggtct

SEQ ID NO: 23057 - RNA, 20 nt, synthetic construct
  source 1..20: mol_type = other RNA
acctgtaatcccagcacttt

SEQ ID NO: 23058 - RNA, 20 nt, synthetic construct
  source 1..20: mol_type = other RNA
actggccaacagaatatggc

SEQ ID NO: 23059 - RNA, 20 nt, synthetic construct
  source 1..20: mol_type = other RNA
cacatgtgcacatgcacgtg

SEQ ID NO: 23060 - RNA, 20 nt, synthetic construct
  source 1..20: mol_type = other RNA
tcccaggacagagctgtgtg

SEQ ID NO: 23061 - RNA, 20 nt, synthetic construct
  source 1..20: mol_type = other RNA
tcgggcatagtctgctcaga

SEQ ID NO: 23062 - RNA, 20 nt, synthetic construct
  source 1..20: mol_type = other RNA
cagccccagtgcccacagga

SEQ ID NO: 23063 - RNA, 20 nt, synthetic construct
  source 1..20: mol_type = other RNA
ttgctggggagaggagcaga

SEQ ID NO: 23064 - RNA, 20 nt, synthetic construct
  source 1..20: mol_type = other RNA
cctgcaagggatccctgcac

SEQ ID NO: 23065 - RNA, 20 nt, synthetic construct
  source 1..20: mol_type = other RNA
tcctgtaggcgcacacacag

SEQ ID NO: 23066 - RNA, 20 nt, synthetic construct
  source 1..20: mol_type = other RNA
acagaccaaaagcagtgggt

SEQ ID NO: 23067 - RNA, 20 nt, synthetic construct
  source 1..20: mol_type = other RNA
tcttattgcccacgctggag

SEQ ID NO: 23068 - RNA, 20 nt, synthetic construct
  source 1..20: mol_type = other RNA
tgcaacctctgcctcctggg

SEQ ID NO: 23069 - RNA, 20 nt, synthetic construct
  source 1..20: mol_type = other RNA
catgttggccaggctggtaa

SEQ ID NO: 23070 - RNA, 20 nt, synthetic construct
  source 1..20: mol_type = other RNA
ccctgtaatcccagcacttt

SEQ ID NO: 23071 - RNA, 20 nt, synthetic construct
  source 1..20: mol_type = other RNA
agtgcaagggaaattcaaag

SEQ ID NO: 23072 - RNA, 20 nt, synthetic construct
  source 1..20: mol_type = other RNA
ttattgagctaatactttct

SEQ ID NO: 23073 - RNA, 20 nt, synthetic construct
  source 1..20: mol_type = other RNA
cacttacttatgcaagctag

SEQ ID NO: 23074 - RNA, 20 nt, synthetic construct
  source 1..20: mol_type = other RNA
ataatcctataaagaaggtg

SEQ ID NO: 23075 - RNA, 20 nt, synthetic construct
  source 1..20: mol_type = other RNA
cacaccttcacataatccta

SEQ ID NO: 23076 - RNA, 20 nt, synthetic construct
  source 1..20: mol_type = other RNA
tagttttatctttttcactt

SEQ ID NO: 23077 - RNA, 20 nt, synthetic construct
  source 1..20: mol_type = other RNA
ttatttatgcagtctgctct

SEQ ID NO: 23078 - RNA, 20 nt, synthetic construct
  source 1..20: mol_type = other RNA
ctaacggtttcattcattct

SEQ ID NO: 23079 - RNA, 20 nt, synthetic construct
  source 1..20: mol_type = other RNA
cagggcaggaacatcttatt

SEQ ID NO: 23080 - RNA, 20 nt, synthetic construct
  source 1..20: mol_type = other RNA
ctggcagccctgtccaaaga

SEQ ID NO: 23081 - RNA, 20 nt, synthetic construct
  source 1..20: mol_type = other RNA
ttagatctgtgacacggaga

SEQ ID NO: 23082 - RNA, 20 nt, synthetic construct
  source 1..20: mol_type = other RNA
agatctaagtgatacttata

SEQ ID NO: 23083 - RNA, 20 nt, synthetic construct
  source 1..20: mol_type = other RNA
actcctataaaggaatggac

SEQ ID NO: 23084 - RNA, 20 nt, synthetic construct
  source 1..20: mol_type = other RNA
tcttcctcgcaggcctctct

SEQ ID NO: 23085 - RNA, 20 nt, synthetic construct
  source 1..20: mol_type = other RNA
ctttttccctggggctctca

SEQ ID NO: 23086 - RNA, 20 nt, synthetic construct
  source 1..20: mol_type = other RNA
ttgagggcaagtggtgctcc

SEQ ID NO: 23087 - RNA, 20 nt, synthetic construct
  source 1..20: mol_type = other RNA
atacacaccaagtgaagcag

SEQ ID NO: 23088 - RNA, 20 nt, synthetic construct
  source 1..20: mol_type = other RNA
ttggtgtgtatgtgaaggtg

SEQ ID NO: 23089 - RNA, 20 nt, synthetic construct
  source 1..20: mol_type = other RNA
ggaatacaagcagtaattct

SEQ ID NO: 23090 - RNA, 20 nt, synthetic construct
  source 1..20: mol_type = other RNA
tgcaacctctgcctccctgg

SEQ ID NO: 23091 - RNA, 20 nt, synthetic construct
  source 1..20: mol_type = other RNA
ttgaggttaggagttcgaga

SEQ ID NO: 23092 - RNA, 20 nt, synthetic construct
  source 1..20: mol_type = other RNA
cgtggtggccaggctggtct

SEQ ID NO: 23093 - RNA, 20 nt, synthetic construct
  source 1..20: mol_type = other RNA
gccagcccgactggggcaga

SEQ ID NO: 23094 - RNA, 20 nt, synthetic construct
  source 1..20: mol_type = other RNA
cagcatgatgtctgttttgc

SEQ ID NO: 23095 - RNA, 20 nt, synthetic construct
  source 1..20: mol_type = other RNA
ccctgaaacagtcgctgcat

SEQ ID NO: 23096 - RNA, 20 nt, synthetic construct
  source 1..20: mol_type = other RNA
atcaaacggagctgggagtc

SEQ ID NO: 23097 - RNA, 20 nt, synthetic construct
  source 1..20: mol_type = other RNA
cttcggagaggacacttcaa

SEQ ID NO: 23098 - RNA, 20 nt, synthetic construct
  source 1..20: mol_type = other RNA
acgggagaggaaggactgtc

SEQ ID NO: 23099 - RNA, 20 nt, synthetic construct
  source 1..20: mol_type = other RNA
ccagggtctgagggctgact

SEQ ID NO: 23100 - RNA, 20 nt, synthetic construct
  source 1..20: mol_type = other RNA
tatcctttccgcaaacttca

SEQ ID NO: 23101 - RNA, 20 nt, synthetic construct
  source 1..20: mol_type = other RNA
atgtttaacatacaagttct

SEQ ID NO: 23102 - RNA, 20 nt, synthetic construct
  source 1..20: mol_type = other RNA
tgaacatctcgcagaacttg

SEQ ID NO: 23103 - RNA, 20 nt, synthetic construct
  source 1..20: mol_type = other RNA
tcttccttgcaggtcgacct

SEQ ID NO: 23104 - RNA, 20 nt, synthetic construct
  source 1..20: mol_type = other RNA
tgcagagatctccaaggcct

SEQ ID NO: 23105 - RNA, 20 nt, synthetic construct
  source 1..20: mol_type = other RNA
tgtgttgcccaggctggtct

SEQ ID NO: 23106 - RNA, 20 nt, synthetic construct
  source 1..20: mol_type = other RNA
ttgaggccaggagtttgaga

SEQ ID NO: 23107 - RNA, 20 nt, synthetic construct
  source 1..20: mol_type = other RNA
gcaatcctcctgcctcagcc

SEQ ID NO: 23108 - RNA, 20 nt, synthetic construct
  source 1..20: mol_type = other RNA
tgcagccttgaactgctggg

SEQ ID NO: 23109 - RNA, 20 nt, synthetic construct
  source 1..20: mol_type = other RNA
ccaggctgggtgcaggggca

SEQ ID NO: 23110 - RNA, 20 nt, synthetic construct
  source 1..20: mol_type = other RNA
cgagtgattccatcttctct

SEQ ID NO: 23111 - RNA, 20 nt, synthetic construct
  source 1..20: mol_type = other RNA
aggactgggagaggagtgag

SEQ ID NO: 23112 - RNA, 20 nt, synthetic construct
  source 1..20: mol_type = other RNA
tcggtgaggacctcactcct

SEQ ID NO: 23113 - RNA, 20 nt, synthetic construct
  source 1..20: mol_type = other RNA
tcctctcccagtcctgtgac

SEQ ID NO: 23114 - RNA, 20 nt, synthetic construct
  source 1..20: mol_type = other RNA
ttgctataaatagaaggtaa

SEQ ID NO: 23115 - RNA, 20 nt, synthetic construct
  source 1..20: mol_type = other RNA
acctgtaatcccaacacttt

SEQ ID NO: 23116 - RNA, 20 nt, synthetic construct
  source 1..20: mol_type = other RNA
tgcaacctctgcctccctag

SEQ ID NO: 23117 - RNA, 20 nt, synthetic construct
  source 1..20: mol_type = other RNA
ctaggctatagtgcagtggc

SEQ ID NO: 23118 - RNA, 20 nt, synthetic construct
  source 1..20: mol_type = other RNA
tctgtcacctaggctatagt

SEQ ID NO: 23119 - RNA, 20 nt, synthetic construct
  source 1..20: mol_type = other RNA
gccactgcactatagcctag

SEQ ID NO: 23120 - RNA, 20 nt, synthetic construct
  source 1..20: mol_type = other RNA
caccctctctgggccctttc

SEQ ID NO: 23121 - RNA, 20 nt, synthetic construct
  source 1..20: mol_type = other RNA
tgtgtgacttcaggcagagg

SEQ ID NO: 23122 - RNA, 20 nt, synthetic construct
  source 1..20: mol_type = other RNA
ctccctgtcctcgactcact

SEQ ID NO: 23123 - RNA, 20 nt, synthetic construct
  source 1..20: mol_type = other RNA
acagtgagtcgaggacaggg

SEQ ID NO: 23124 - RNA, 20 nt, synthetic construct
  source 1..20: mol_type = other RNA
acactttggctattagagat

SEQ ID NO: 23125 - RNA, 20 nt, synthetic construct
  source 1..20: mol_type = other RNA
gattttcatttagcgtttgc

SEQ ID NO: 23126 - RNA, 20 nt, synthetic construct
  source 1..20: mol_type = other RNA
cttgtactactcgaactcat

SEQ ID NO: 23127 - RNA, 20 nt, synthetic construct
  source 1..20: mol_type = other RNA
ttatccctcaaaaacaactc

SEQ ID NO: 23128 - RNA, 20 nt, synthetic construct
  source 1..20: mol_type = other RNA
atggagctcagagaggttaa

SEQ ID NO: 23129 - RNA, 20 nt, synthetic construct
  source 1..20: mol_type = other RNA
acacacacacacaaaaaaac

SEQ ID NO: 23130 - RNA, 20 nt, synthetic construct
  source 1..20: mol_type = other RNA
ccaggctggagggcagtggc

SEQ ID NO: 23131 - RNA, 20 nt, synthetic construct
  source 1..20: mol_type = other RNA
tgcagttccaggttcaagca

SEQ ID NO: 23132 - RNA, 20 nt, synthetic construct
  source 1..20: mol_type = other RNA
catgcctggctaattgatgt

SEQ ID NO: 23133 - RNA, 20 nt, synthetic construct
  source 1..20: mol_type = other RNA
catgttggccaggctaaaat

SEQ ID NO: 23134 - RNA, 20 nt, synthetic construct
  source 1..20: mol_type = other RNA
gaaggggatctagcacccaa

SEQ ID NO: 23135 - RNA, 20 nt, synthetic construct
  source 1..20: mol_type = other RNA
ccaccagtgcgcgtaaaacg

SEQ ID NO: 23136 - RNA, 20 nt, synthetic construct
  source 1..20: mol_type = other RNA
agcatttgccctgaggagca

SEQ ID NO: 23137 - RNA, 20 nt, synthetic construct
  source 1..20: mol_type = other RNA
acagccaggaaggggcagaa

SEQ ID NO: 23138 - RNA, 20 nt, synthetic construct
  source 1..20: mol_type = other RNA
ccaccctctctgggccagtt

SEQ ID NO: 23139 - RNA, 20 nt, synthetic construct
  source 1..20: mol_type = other RNA
cctcccctactcacgcagcc

SEQ ID NO: 23140 - RNA, 20 nt, synthetic construct
  source 1..20: mol_type = other RNA
cagcgtggaggatcagaatg

SEQ ID NO: 23141 - RNA, 20 nt, synthetic construct
  source 1..20: mol_type = other RNA
gcagccattctgatcctcca

SEQ ID NO: 23142 - RNA, 20 nt, synthetic construct
  source 1..20: mol_type = other RNA
agagaaatgatgaccacttt

SEQ ID NO: 23143 - RNA, 20 nt, synthetic construct
  source 1..20: mol_type = other RNA
aaagcccgctgctgatcagc

SEQ ID NO: 23144 - RNA, 20 nt, synthetic construct
  source 1..20: mol_type = other RNA
gcccaagactccctgagccc

SEQ ID NO: 23145 - RNA, 20 nt, synthetic construct
  source 1..20: mol_type = other RNA
catataacacccaaagcagt

SEQ ID NO: 23146 - RNA, 20 nt, synthetic construct
  source 1..20: mol_type = other RNA
taccgccctgggacgcctcc

SEQ ID NO: 23147 - RNA, 20 nt, synthetic construct
  source 1..20: mol_type = other RNA
tgggggaaacatcaggacag

SEQ ID NO: 23148 - RNA, 20 nt, synthetic construct
  source 1..20: mol_type = other RNA
cctgtgaagccgccaaggag

SEQ ID NO: 23149 - RNA, 20 nt, synthetic construct
  source 1..20: mol_type = other RNA
ctgccccaagcatcaccctg

SEQ ID NO: 23150 - RNA, 20 nt, synthetic construct
  source 1..20: mol_type = other RNA
agggtgatgcttggggcagg

SEQ ID NO: 23151 - RNA, 20 nt, synthetic construct
  source 1..20: mol_type = other RNA
agctgccatcccaggcccca

SEQ ID NO: 23152 - RNA, 20 nt, synthetic construct
  source 1..20: mol_type = other RNA
cgcccttgggctacttcaaa

SEQ ID NO: 23153 - RNA, 20 nt, synthetic construct
  source 1..20: mol_type = other RNA
tatcccaatctaatttgcac

SEQ ID NO: 23154 - RNA, 20 nt, synthetic construct
  source 1..20: mol_type = other RNA
ctccgtataccctctaaaat

SEQ ID NO: 23155 - RNA, 20 nt, synthetic construct
  source 1..20: mol_type = other RNA
tatatgtgattccttgttac

SEQ ID NO: 23156 - RNA, 20 nt, synthetic construct
  source 1..20: mol_type = other RNA
atatagtgagcaagcaattt

SEQ ID NO: 23157 - RNA, 20 nt, synthetic construct
  source 1..20: mol_type = other RNA
ccgacagttgttaatctctt

SEQ ID NO: 23158 - RNA, 20 nt, synthetic construct
  source 1..20: mol_type = other RNA
agggccttggcctgtattct

SEQ ID NO: 23159 - RNA, 20 nt, synthetic construct
  source 1..20: mol_type = other RNA
taaagagaaaatcatcatcg

SEQ ID NO: 23160 - RNA, 20 nt, synthetic construct
  source 1..20: mol_type = other RNA
ataaaaaagtagttttacag

SEQ ID NO: 23161 - RNA, 20 nt, synthetic construct
  source 1..20: mol_type = other RNA
caactgatcaaagttaacat

SEQ ID NO: 23162 - RNA, 20 nt, synthetic construct
  source 1..20: mol_type = other RNA
ttctgcaatattcctgccaa

SEQ ID NO: 23163 - RNA, 20 nt, synthetic construct
  source 1..20: mol_type = other RNA
aagagagaaagacagactga

SEQ ID NO: 23164 - RNA, 20 nt, synthetic construct
  source 1..20: mol_type = other RNA
ccaggctggagtgcagtggt

SEQ ID NO: 23165 - RNA, 20 nt, synthetic construct
  source 1..20: mol_type = other RNA
tgcagccttgaactcccgga

SEQ ID NO: 23166 - RNA, 20 nt, synthetic construct
  source 1..20: mol_type = other RNA
ttgagtttgaaaccagcctg

SEQ ID NO: 23167 - RNA, 20 nt, synthetic construct
  source 1..20: mol_type = other RNA
tatgttgcccaggctggttt

SEQ ID NO: 23168 - RNA, 20 nt, synthetic construct
  source 1..20: mol_type = other RNA
cagttgcaccagttagcact

SEQ ID NO: 23169 - RNA, 20 nt, synthetic construct
  source 1..20: mol_type = other RNA
acttacagaaaagttgcaag

SEQ ID NO: 23170 - RNA, 20 nt, synthetic construct
  source 1..20: mol_type = other RNA
tggaggcacccctcaaaccc

SEQ ID NO: 23171 - RNA, 20 nt, synthetic construct
  source 1..20: mol_type = other RNA
aaataaatggaggcacagaa

SEQ ID NO: 23172 - RNA, 20 nt, synthetic construct
  source 1..20: mol_type = other RNA
aataaaagtggcagacctct

SEQ ID NO: 23173 - RNA, 20 nt, synthetic construct
  source 1..20: mol_type = other RNA
tttcttagttcggcaaaaca

SEQ ID NO: 23174 - RNA, 20 nt, synthetic construct
  source 1..20: mol_type = other RNA
tgtcttgagacacatactgg

SEQ ID NO: 23175 - RNA, 20 nt, synthetic construct
  source 1..20: mol_type = other RNA
ccagaaggtccttggccata

SEQ ID NO: 23176 - RNA, 20 nt, synthetic construct
  source 1..20: mol_type = other RNA
cattgtctgtctcttgctta

SEQ ID NO: 23177 - RNA, 20 nt, synthetic construct
  source 1..20: mol_type = other RNA
tttcattaggaaccgggacg

SEQ ID NO: 23178 - RNA, 20 nt, synthetic construct
  source 1..20: mol_type = other RNA
gtcccagcagttctggtgca

SEQ ID NO: 23179 - RNA, 20 nt, synthetic construct
  source 1..20: mol_type = other RNA
aggatataaatattcatgca

SEQ ID NO: 23180 - RNA, 20 nt, synthetic construct
  source 1..20: mol_type = other RNA
ctaatcctcacaacaaggga

SEQ ID NO: 23181 - RNA, 20 nt, synthetic construct
  source 1..20: mol_type = other RNA
aacaagggagattttcatta

SEQ ID NO: 23182 - RNA, 20 nt, synthetic construct
  source 1..20: mol_type = other RNA
atcccagggtagctgtgacc

SEQ ID NO: 23183 - RNA, 20 nt, synthetic construct
  source 1..20: mol_type = other RNA
agctaccctgggatgtgaac

SEQ ID NO: 23184 - RNA, 20 nt, synthetic construct
  source 1..20: mol_type = other RNA
acagtggggcccaggatgaa

SEQ ID NO: 23185 - RNA, 20 nt, synthetic construct
  source 1..20: mol_type = other RNA
atgtgttccccacacgccaa

SEQ ID NO: 23186 - RNA, 20 nt, synthetic construct
  source 1..20: mol_type = other RNA
tgtttcctggattggcgtgt

SEQ ID NO: 23187 - RNA, 20 nt, synthetic construct
  source 1..20: mol_type = other RNA
caagttacactgcttcaaag

SEQ ID NO: 23188 - RNA, 20 nt, synthetic construct
  source 1..20: mol_type = other RNA
tcattcaacagactttgacc

SEQ ID NO: 23189 - RNA, 20 nt, synthetic construct
  source 1..20: mol_type = other RNA
taaactcccctcatccaagc

SEQ ID NO: 23190 - RNA, 20 nt, synthetic construct
  source 1..20: mol_type = other RNA
ctctggcctggacaactaac

SEQ ID NO: 23191 - RNA, 20 nt, synthetic construct
  source 1..20: mol_type = other RNA
tgacctttcctggggctgtt

SEQ ID NO: 23192 - RNA, 20 nt, synthetic construct
  source 1..20: mol_type = other RNA
ctgaaggtcttggcaccact

SEQ ID NO: 23193 - RNA, 20 nt, synthetic construct
  source 1..20: mol_type = other RNA
ttctgtttcactccatgtct

SEQ ID NO: 23194 - RNA, 20 nt, synthetic construct
  source 1..20: mol_type = other RNA
tccatgtctacacctacaga

SEQ ID NO: 23195 - RNA, 20 nt, synthetic construct
  source 1..20: mol_type = other RNA
tgccatgtcctcaacactta

SEQ ID NO: 23196 - RNA, 20 nt, synthetic construct
  source 1..20: mol_type = other RNA
caagtgccaaagggccaagg

SEQ ID NO: 23197 - RNA, 20 nt, synthetic construct
  source 1..20: mol_type = other RNA
tgtgttcaatcaccaggcac

SEQ ID NO: 23198 - RNA, 20 nt, synthetic construct
  source 1..20: mol_type = other RNA
caggcactgtactgaaccaa

SEQ ID NO: 23199 - RNA, 20 nt, synthetic construct
  source 1..20: mol_type = other RNA
agtgagatttctttgaagaa

SEQ ID NO: 23200 - RNA, 20 nt, synthetic construct
  source 1..20: mol_type = other RNA
tgtgaacccattaggagagc

SEQ ID NO: 23201 - RNA, 20 nt, synthetic construct
  source 1..20: mol_type = other RNA
ctccctaaggccgcaccccg

SEQ ID NO: 23202 - RNA, 20 nt, synthetic construct
  source 1..20: mol_type = other RNA
gaaggcagagccttcatggg

SEQ ID NO: 23203 - RNA, 20 nt, synthetic construct
  source 1..20: mol_type = other RNA
cgcaagcaggctgagtccac

SEQ ID NO: 23204 - RNA, 20 nt, synthetic construct
  source 1..20: mol_type = other RNA
tgggcacagggtctaagtgg

SEQ ID NO: 23205 - RNA, 20 nt, synthetic construct
  source 1..20: mol_type = other RNA
agggcaggcaggaacgcctt

SEQ ID NO: 23206 - RNA, 20 nt, synthetic construct
  source 1..20: mol_type = other RNA
cagacctggcagctgcctga

SEQ ID NO: 23207 - RNA, 20 nt, synthetic construct
  source 1..20: mol_type = other RNA
gtgttctctctaattgagtc

SEQ ID NO: 23208 - RNA, 20 nt, synthetic construct
  source 1..20: mol_type = other RNA
aaggaagagaggcagctaga

SEQ ID NO: 23209 - RNA, 20 nt, synthetic construct
  source 1..20: mol_type = other RNA
atacacagtgggctggatgc

SEQ ID NO: 23210 - RNA, 20 nt, synthetic construct
  source 1..20: mol_type = other RNA
agccccaaagacaggacttg

SEQ ID NO: 23211 - RNA, 20 nt, synthetic construct
  source 1..20: mol_type = other RNA
agaacaggcaggcagggagc

SEQ ID NO: 23212 - RNA, 20 nt, synthetic construct
  source 1..20: mol_type = other RNA
agctttggcctagagcccct

SEQ ID NO: 23213 - RNA, 20 nt, synthetic construct
  source 1..20: mol_type = other RNA
ctttgtactgtggcccttgg

SEQ ID NO: 23214 - RNA, 20 nt, synthetic construct
  source 1..20: mol_type = other RNA
agagctaccccaaatgtaac

SEQ ID NO: 23215 - RNA, 20 nt, synthetic construct
  source 1..20: mol_type = other RNA
cagctgtcccctttgctgga

SEQ ID NO: 23216 - RNA, 20 nt, synthetic construct
  source 1..20: mol_type = other RNA
ctcctccaggtctaactgga

SEQ ID NO: 23217 - RNA, 20 nt, synthetic construct
  source 1..20: mol_type = other RNA
cgcaccccgagatgtgcccc

SEQ ID NO: 23218 - RNA, 20 nt, synthetic construct
  source 1..20: mol_type = other RNA
ttaattttgaaaacagttat

SEQ ID NO: 23219 - RNA, 20 nt, synthetic construct
  source 1..20: mol_type = other RNA
ctgtgagaggcagaagataa

SEQ ID NO: 23220 - RNA, 20 nt, synthetic construct
  source 1..20: mol_type = other RNA
gttttcaaaaccgaaagtaa

SEQ ID NO: 23221 - RNA, 20 nt, synthetic construct
  source 1..20: mol_type = other RNA
ggcgccagtgcactccagcg

SEQ ID NO: 23222 - RNA, 20 nt, synthetic construct
  source 1..20: mol_type = other RNA
gttttgccagaggaaaaggt

SEQ ID NO: 23223 - RNA, 20 nt, synthetic construct
  source 1..20: mol_type = other RNA
gatcaaaacattctgctttc

SEQ ID NO: 23224 - RNA, 20 nt, synthetic construct
  source 1..20: mol_type = other RNA
gagaaaattgcatttaattt

SEQ ID NO: 23225 - RNA, 20 nt, synthetic construct
  source 1..20: mol_type = other RNA
tttaaaaaataacaatctga

SEQ ID NO: 23226 - RNA, 20 nt, synthetic construct
  source 1..20: mol_type = other RNA
tacatgtttcttgtggtatc

SEQ ID NO: 23227 - RNA, 20 nt, synthetic construct
  source 1..20: mol_type = other RNA
cattacatgtttcttgtggt

SEQ ID NO: 23228 - RNA, 20 nt, synthetic construct
  source 1..20: mol_type = other RNA
aaagccagtaactggttgag

SEQ ID NO: 23229 - RNA, 20 nt, synthetic construct
  source 1..20: mol_type = other RNA
cctgcctggaactctctgtt

SEQ ID NO: 23230 - RNA, 20 nt, synthetic construct
  source 1..20: mol_type = other RNA
aacattaaaagctaagagag

SEQ ID NO: 23231 - RNA, 20 nt, synthetic construct
  source 1..20: mol_type = other RNA
tagattccccaatccacctc

SEQ ID NO: 23232 - RNA, 20 nt, synthetic construct
  source 1..20: mol_type = other RNA
taaggaaaggctactagccc

SEQ ID NO: 23233 - RNA, 20 nt, synthetic construct
  source 1..20: mol_type = other RNA
gtaccctgaatataagtgta

SEQ ID NO: 23234 - RNA, 20 nt, synthetic construct
  source 1..20: mol_type = other RNA
tgaaaatgaagagaagtgtt

SEQ ID NO: 23235 - RNA, 20 nt, synthetic construct
  source 1..20: mol_type = other RNA
tttcaatgaaaaatatagag

SEQ ID NO: 23236 - RNA, 20 nt, synthetic construct
  source 1..20: mol_type = other RNA
gcctctcattttggaaagta

SEQ ID NO: 23237 - RNA, 20 nt, synthetic construct
  source 1..20: mol_type = other RNA
tttggaaagtactgtttctg

SEQ ID NO: 23238 - RNA, 20 nt, synthetic construct
  source 1..20: mol_type = other RNA
aatggaaagtatgttctgtc

SEQ ID NO: 23239 - RNA, 20 nt, synthetic construct
  source 1..20: mol_type = other RNA
gagctaaaaaacaaagaaac

SEQ ID NO: 23240 - RNA, 20 nt, synthetic construct
  source 1..20: mol_type = other RNA
gaaattaggtacaaagtcag

SEQ ID NO: 23241 - RNA, 20 nt, synthetic construct
  source 1..20: mol_type = other RNA
tccattgcccaggctggagt

SEQ ID NO: 23242 - RNA, 20 nt, synthetic construct
  source 1..20: mol_type = other RNA
acagtttagaaaatcagatg

SEQ ID NO: 23243 - RNA, 20 nt, synthetic construct
  source 1..20: mol_type = other RNA
gttattgtactctgtttcca

SEQ ID NO: 23244 - RNA, 20 nt, synthetic construct
  source 1..20: mol_type = other RNA
aatagcccccatcaaattac

SEQ ID NO: 23245 - RNA, 20 nt, synthetic construct
  source 1..20: mol_type = other RNA
ttctcagttcataatagccc

SEQ ID NO: 23246 - RNA, 20 nt, synthetic construct
  source 1..20: mol_type = other RNA
agcattccttaacacatcac

SEQ ID NO: 23247 - RNA, 20 nt, synthetic construct
  source 1..20: mol_type = other RNA
gtagactcttgagtgatgtg

SEQ ID NO: 23248 - RNA, 20 nt, synthetic construct
  source 1..20: mol_type = other RNA
aattcctctatacatgcctt

SEQ ID NO: 23249 - RNA, 20 nt, synthetic construct
  source 1..20: mol_type = other RNA
cgatttctcccaattccatt

SEQ ID NO: 23250 - RNA, 20 nt, synthetic construct
  source 1..20: mol_type = other RNA
ttggccagagtggaaatgga

SEQ ID NO: 23251 - RNA, 20 nt, synthetic construct
  source 1..20: mol_type = other RNA
ccagcagagaatggaaagtc

SEQ ID NO: 23252 - RNA, 20 nt, synthetic construct
  source 1..20: mol_type = other RNA
ccatccgacattgaagttga

SEQ ID NO: 23253 - RNA, 20 nt, synthetic construct
  source 1..20: mol_type = other RNA
ctttttcagtgggggtgaat

SEQ ID NO: 23254 - RNA, 20 nt, synthetic construct
  source 1..20: mol_type = other RNA
acacaactttcagcagctta

SEQ ID NO: 23255 - RNA, 20 nt, synthetic construct
  source 1..20: mol_type = other RNA
atcataaagctgctttgata

SEQ ID NO: 23256 - RNA, 20 nt, synthetic construct
  source 1..20: mol_type = other RNA
aaagctgctttgatataaaa

SEQ ID NO: 23257 - RNA, 20 nt, synthetic construct
  source 1..20: mol_type = other RNA
tcagggtagtatggccatag

SEQ ID NO: 23258 - RNA, 20 nt, synthetic construct
  source 1..20: mol_type = other RNA
gggtaggaacagcagcctat

SEQ ID NO: 23259 - RNA, 20 nt, synthetic construct
  source 1..20: mol_type = other RNA
agatcgagacatgtaagcag

SEQ ID NO: 23260 - RNA, 20 nt, synthetic construct
  source 1..20: mol_type = other RNA
ggaggtaagtttttgacctt

SEQ ID NO: 23261 - RNA, 20 nt, synthetic construct
  source 1..20: mol_type = other RNA
gccactccacaggagaaggg

SEQ ID NO: 23262 - RNA, 20 nt, synthetic construct
  source 1..20: mol_type = other RNA
gttcccttctcctgtggagt

SEQ ID NO: 23263 - RNA, 20 nt, synthetic construct
  source 1..20: mol_type = other RNA
tttctctcctcagcagagat

SEQ ID NO: 23264 - RNA, 20 nt, synthetic construct
  source 1..20: mol_type = other RNA
tatatcaagttataacaatc

SEQ ID NO: 23265 - RNA, 20 nt, synthetic construct
  source 1..20: mol_type = other RNA
tgaaaagcctttggactcca

SEQ ID NO: 23266 - RNA, 20 nt, synthetic construct
  source 1..20: mol_type = other RNA
ccaccttcctgatgctctcc

SEQ ID NO: 23267 - RNA, 20 nt, synthetic construct
  source 1..20: mol_type = other RNA
taagtaacacatgactatat

SEQ ID NO: 23268 - RNA, 20 nt, synthetic construct
  source 1..20: mol_type = other RNA
gtgttacttaatgacgggga

SEQ ID NO: 23269 - RNA, 20 nt, synthetic construct
  source 1..20: mol_type = other RNA
aagattaaaatagcatattt

SEQ ID NO: 23270 - RNA, 20 nt, synthetic construct
  source 1..20: mol_type = other RNA
atatacagtccatcattgac

SEQ ID NO: 23271 - RNA, 20 nt, synthetic construct
  source 1..20: mol_type = other RNA
tgaccaaaacatcatatcag

SEQ ID NO: 23272 - RNA, 20 nt, synthetic construct
  source 1..20: mol_type = other RNA
atcagcattttttcttctaa

SEQ ID NO: 23273 - RNA, 20 nt, synthetic construct
  source 1..20: mol_type = other RNA
taccaaacttgtctaatttc

SEQ ID NO: 23274 - RNA, 20 nt, synthetic construct
  source 1..20: mol_type = other RNA
tgctaacctttttcttttct

SEQ ID NO: 23275 - RNA, 20 nt, synthetic construct
  source 1..20: mol_type = other RNA
ccaatccaaatgcggcatct

SEQ ID NO: 23276 - RNA, 20 nt, synthetic construct
  source 1..20: mol_type = other RNA
gtccatgttaacattattat

SEQ ID NO: 23277 - RNA, 20 nt, synthetic construct
  source 1..20: mol_type = other RNA
tataacaaatttccaataat

SEQ ID NO: 23278 - RNA, 20 nt, synthetic construct
  source 1..20: mol_type = other RNA
tcattataacaaatttccaa

SEQ ID NO: 23279 - RNA, 20 nt, synthetic construct
  source 1..20: mol_type = other RNA
ataagattcatatttacttc

SEQ ID NO: 23280 - RNA, 20 nt, synthetic construct
  source 1..20: mol_type = other RNA
atttacttcttatacatttg

SEQ ID NO: 23281 - RNA, 20 nt, synthetic construct
  source 1..20: mol_type = other RNA
aaaacttgatgtgttatctc

SEQ ID NO: 23282 - RNA, 20 nt, synthetic construct
  source 1..20: mol_type = other RNA
gacctggcccgcaggaaaga

SEQ ID NO: 23283 - RNA, 20 nt, synthetic construct
  source 1..20: mol_type = other RNA
gaggagtatgcagactctaa

SEQ ID NO: 23284 - RNA, 20 nt, synthetic construct
  source 1..20: mol_type = other RNA
cccttggtctccctggggga

SEQ ID NO: 23285 - RNA, 20 nt, synthetic construct
  source 1..20: mol_type = other RNA
ttctagattacttgtaatac

SEQ ID NO: 23286 - RNA, 20 nt, synthetic construct
  source 1..20: mol_type = other RNA
tattccttaaacaataacaa

SEQ ID NO: 23287 - RNA, 20 nt, synthetic construct
  source 1..20: mol_type = other RNA
tcaaagtacagcgggccttc

SEQ ID NO: 23288 - RNA, 20 nt, synthetic construct
  source 1..20: mol_type = other RNA
ggcagcccttggagtcaggg

SEQ ID NO: 23289 - RNA, 20 nt, synthetic construct
  source 1..20: mol_type = other RNA
ggagcagagtgcagtggtat

SEQ ID NO: 23290 - RNA, 20 nt, synthetic construct
  source 1..20: mol_type = other RNA
ttctccttgattaaaagtga

SEQ ID NO: 23291 - RNA, 20 nt, synthetic construct
  source 1..20: mol_type = other RNA
tttgactcacactgattgtg

SEQ ID NO: 23292 - RNA, 20 nt, synthetic construct
  source 1..20: mol_type = other RNA
tgcaacctctgccttcccag

SEQ ID NO: 23293 - RNA, 20 nt, synthetic construct
  source 1..20: mol_type = other RNA
tctctctcccgtaagcgagt

SEQ ID NO: 23294 - RNA, 20 nt, synthetic construct
  source 1..20: mol_type = other RNA
ctcaaaccagaaagacaagc

SEQ ID NO: 23295 - RNA, 20 nt, synthetic construct
  source 1..20: mol_type = other RNA
tgtaatgtcacaactttctt

SEQ ID NO: 23296 - RNA, 20 nt, synthetic construct
  source 1..20: mol_type = other RNA
gcgactacactccagcctgg

SEQ ID NO: 23297 - RNA, 20 nt, synthetic construct
  source 1..20: mol_type = other RNA
ctctacaaaaaataattaaa

SEQ ID NO: 23298 - RNA, 20 nt, synthetic construct
  source 1..20: mol_type = other RNA
gcctgtaagcccagcaattt

SEQ ID NO: 23299 - RNA, 20 nt, synthetic construct
  source 1..20: mol_type = other RNA
aactttctaaagacggtgtt

SEQ ID NO: 23300 - RNA, 20 nt, synthetic construct
  source 1..20: mol_type = other RNA
tttgatgggggttcggaaaa

SEQ ID NO: 23301 - RNA, 20 nt, synthetic construct
  source 1..20: mol_type = other RNA
ccatgtggggtttttgtgac

SEQ ID NO: 23302 - RNA, 20 nt, synthetic construct
  source 1..20: mol_type = other RNA
tatagagtggttgagaggga

SEQ ID NO: 23303 - RNA, 20 nt, synthetic construct
  source 1..20: mol_type = other RNA
cagctccctgctctcatccc

SEQ ID NO: 23304 - RNA, 20 nt, synthetic construct
  source 1..20: mol_type = other RNA
cccctactcctgtctgcctt

SEQ ID NO: 23305 - RNA, 20 nt, synthetic construct
  source 1..20: mol_type = other RNA
ctactccagccatgttggca

SEQ ID NO: 23306 - RNA, 20 nt, synthetic construct
  source 1..20: mol_type = other RNA
tgataaggtgcaaagaatag

SEQ ID NO: 23307 - RNA, 20 nt, synthetic construct
  source 1..20: mol_type = other RNA
gcagttctcatgcctcagcc

SEQ ID NO: 23308 - RNA, 20 nt, synthetic construct
  source 1..20: mol_type = other RNA
gcctcagcctcccaaatagc

SEQ ID NO: 23309 - RNA, 20 nt, synthetic construct
  source 1..20: mol_type = other RNA
gcctgttatcccagtacttt

SEQ ID NO: 23310 - RNA, 20 nt, synthetic construct
  source 1..20: mol_type = other RNA
caacgcatccatccactgaa

SEQ ID NO: 23311 - RNA, 20 nt, synthetic construct
  source 1..20: mol_type = other RNA
ccatctacccactcatcaac

SEQ ID NO: 23312 - RNA, 20 nt, synthetic construct
  source 1..20: mol_type = other RNA
tggtaaagtaggaataatgg

SEQ ID NO: 23313 - RNA, 20 nt, synthetic construct
  source 1..20: mol_type = other RNA
gtaatgccattattcctact

SEQ ID NO: 23314 - RNA, 20 nt, synthetic construct
  source 1..20: mol_type = other RNA
taacttctctgtgcctcagt

SEQ ID NO: 23315 - RNA, 20 nt, synthetic construct
  source 1..20: mol_type = other RNA
gaccagaggcaaatcattaa

SEQ ID NO: 23316 - RNA, 20 nt, synthetic construct
  source 1..20: mol_type = other RNA
gagaccccatagtctccctc

SEQ ID NO: 23317 - RNA, 20 nt, synthetic construct
  source 1..20: mol_type = other RNA
gacctgaggagggagactat

SEQ ID NO: 23318 - RNA, 20 nt, synthetic construct
  source 1..20: mol_type = other RNA
gagtcctggccaattgcagt

SEQ ID NO: 23319 - RNA, 20 nt, synthetic construct
  source 1..20: mol_type = other RNA
caggctggtttcagtttgaa

SEQ ID NO: 23320 - RNA, 20 nt, synthetic construct
  source 1..20: mol_type = other RNA
cacccatcctagctccccct

SEQ ID NO: 23321 - RNA, 20 nt, synthetic construct
  source 1..20: mol_type = other RNA
gtggccaaggtcacatggta

SEQ ID NO: 23322 - RNA, 20 nt, synthetic construct
  source 1..20: mol_type = other RNA
tgctcccatttcagagatga

SEQ ID NO: 23323 - RNA, 20 nt, synthetic construct
  source 1..20: mol_type = other RNA
ctctgaaatgggagcaatga

SEQ ID NO: 23324 - RNA, 20 nt, synthetic construct
  source 1..20: mol_type = other RNA
ttaaccctcactagagccct

SEQ ID NO: 23325 - RNA, 20 nt, synthetic construct
  source 1..20: mol_type = other RNA
acctcttggaattgggaagg

SEQ ID NO: 23326 - RNA, 20 nt, synthetic construct
  source 1..20: mol_type = other RNA
ctccactttatagatgggga

SEQ ID NO: 23327 - RNA, 20 nt, synthetic construct
  source 1..20: mol_type = other RNA
ctttccaccatgcacgttgg

SEQ ID NO: 23328 - RNA, 20 nt, synthetic construct
  source 1..20: mol_type = other RNA
gggcaaaaatgtcacgcaat

SEQ ID NO: 23329 - RNA, 20 nt, synthetic construct
  source 1..20: mol_type = other RNA
tgcgtgacatttttgcccat

SEQ ID NO: 23330 - RNA, 20 nt, synthetic construct
  source 1..20: mol_type = other RNA
tcctagaactgagacctcat

SEQ ID NO: 23331 - RNA, 20 nt, synthetic construct
  source 1..20: mol_type = other RNA
cttggactgcttctctggcc

SEQ ID NO: 23332 - RNA, 20 nt, synthetic construct
  source 1..20: mol_type = other RNA
agcaacagagaacagaaacc

SEQ ID NO: 23333 - RNA, 20 nt, synthetic construct
  source 1..20: mol_type = other RNA
tattctcaccctgtcttttt

SEQ ID NO: 23334 - RNA, 20 nt, synthetic construct
  source 1..20: mol_type = other RNA
tataacctctgcctcccaga

SEQ ID NO: 23335 - RNA, 20 nt, synthetic construct
  source 1..20: mol_type = other RNA
catgttggccaggctggtct

SEQ ID NO: 23336 - RNA, 20 nt, synthetic construct
  source 1..20: mol_type = other RNA
gttggccaggctggtctcaa

SEQ ID NO: 23337 - RNA, 20 nt, synthetic construct
  source 1..20: mol_type = other RNA
gtctacttatcagttaatcc

SEQ ID NO: 23338 - RNA, 20 nt, synthetic construct
  source 1..20: mol_type = other RNA
acaccctcccatgtccctcc

SEQ ID NO: 23339 - RNA, 20 nt, synthetic construct
  source 1..20: mol_type = other RNA
ttatttagcacctgctagaa

SEQ ID NO: 23340 - RNA, 20 nt, synthetic construct
  source 1..20: mol_type = other RNA
gctttttggtgaaagagcac

SEQ ID NO: 23341 - RNA, 20 nt, synthetic construct
  source 1..20: mol_type = other RNA
ctcatgctttttggtgaaag

SEQ ID NO: 23342 - RNA, 20 nt, synthetic construct
  source 1..20: mol_type = other RNA
ccatttggaactggaggctg

SEQ ID NO: 23343 - RNA, 20 nt, synthetic construct
  source 1..20: mol_type = other RNA
tcaaatctaaaactccattc

SEQ ID NO: 23344 - RNA, 20 nt, synthetic construct
  source 1..20: mol_type = other RNA
tccttcaaatggtcttagaa

SEQ ID NO: 23345 - RNA, 20 nt, synthetic construct
  source 1..20: mol_type = other RNA
ctctaccacaaataaaaaaa

SEQ ID NO: 23346 - RNA, 20 nt, synthetic construct
  source 1..20: mol_type = other RNA
acatctgttaatgtctagga

SEQ ID NO: 23347 - RNA, 20 nt, synthetic construct
  source 1..20: mol_type = other RNA
ctctgctacctctgattaga

SEQ ID NO: 23348 - RNA, 20 nt, synthetic construct
  source 1..20: mol_type = other RNA
aagcatcatctctgctacct

SEQ ID NO: 23349 - RNA, 20 nt, synthetic construct
  source 1..20: mol_type = other RNA
cgcgcttccagctaactata

SEQ ID NO: 23350 - RNA, 20 nt, synthetic construct
  source 1..20: mol_type = other RNA
taaggttgccatgctggggt

SEQ ID NO: 23351 - RNA, 20 nt, synthetic construct
  source 1..20: mol_type = other RNA
cacctctgcaagagtttttt

SEQ ID NO: 23352 - RNA, 20 nt, synthetic construct
  source 1..20: mol_type = other RNA
tcctcctcgtgctctttgcc

SEQ ID NO: 23353 - RNA, 20 nt, synthetic construct
  source 1..20: mol_type = other RNA
tctgcctctgagacatccgg

SEQ ID NO: 23354 - RNA, 20 nt, synthetic construct
  source 1..20: mol_type = other RNA
ctgtagactctctaccctgg

SEQ ID NO: 23355 - RNA, 20 nt, synthetic construct
  source 1..20: mol_type = other RNA
ctacatcttccctgactcct

SEQ ID NO: 23356 - RNA, 20 nt, synthetic construct
  source 1..20: mol_type = other RNA
tatcctatgacctggtgcca

SEQ ID NO: 23357 - RNA, 20 nt, synthetic construct
  source 1..20: mol_type = other RNA
aggataatgagacttcttag

SEQ ID NO: 23358 - RNA, 20 nt, synthetic construct
  source 1..20: mol_type = other RNA
gtgattctcatccctcagtc

SEQ ID NO: 23359 - RNA, 20 nt, synthetic construct
  source 1..20: mol_type = other RNA
ccctcagtctcccgagtagc

SEQ ID NO: 23360 - RNA, 20 nt, synthetic construct
  source 1..20: mol_type = other RNA
ttgaggtcaggagttgaaga

SEQ ID NO: 23361 - RNA, 20 nt, synthetic construct
  source 1..20: mol_type = other RNA
gcctgtaatcctagtccttt

SEQ ID NO: 23362 - RNA, 20 nt, synthetic construct
  source 1..20: mol_type = other RNA
tcttagaatttctgacattc

SEQ ID NO: 23363 - RNA, 20 nt, synthetic construct
  source 1..20: mol_type = other RNA
cctcatttcacacatgggga

SEQ ID NO: 23364 - RNA, 20 nt, synthetic construct
  source 1..20: mol_type = other RNA
ttcacacatggggaaactga

SEQ ID NO: 23365 - RNA, 20 nt, synthetic construct
  source 1..20: mol_type = other RNA
gcatttttgctgaaagagca

SEQ ID NO: 23366 - RNA, 20 nt, synthetic construct
  source 1..20: mol_type = other RNA
gtttccaaaccttcatttca

SEQ ID NO: 23367 - RNA, 20 nt, synthetic construct
  source 1..20: mol_type = other RNA
ttcagtaccaccttcatcat

SEQ ID NO: 23368 - RNA, 20 nt, synthetic construct
  source 1..20: mol_type = other RNA
catttttgtgttttccacat

SEQ ID NO: 23369 - RNA, 20 nt, synthetic construct
  source 1..20: mol_type = other RNA
aaataatagtaaagtgttat

SEQ ID NO: 23370 - RNA, 20 nt, synthetic construct
  source 1..20: mol_type = other RNA
ttttgtgttttccacataac

SEQ ID NO: 23371 - RNA, 20 nt, synthetic construct
  source 1..20: mol_type = other RNA
gaaatacactccagcctggg

SEQ ID NO: 23372 - RNA, 20 nt, synthetic construct
  source 1..20: mol_type = other RNA
gatcatagctcactgcagcc

SEQ ID NO: 23373 - RNA, 20 nt, synthetic construct
  source 1..20: mol_type = other RNA
agctcactgcagcctccaac

SEQ ID NO: 23374 - RNA, 20 nt, synthetic construct
  source 1..20: mol_type = other RNA
acatggctaatttttaaaaa

SEQ ID NO: 23375 - RNA, 20 nt, synthetic construct
  source 1..20: mol_type = other RNA
ttgtagaaaaattagctgga

SEQ ID NO: 23376 - RNA, 20 nt, synthetic construct
  source 1..20: mol_type = other RNA
gccattgcactctagcctgg

SEQ ID NO: 23377 - RNA, 20 nt, synthetic construct
  source 1..20: mol_type = other RNA
atattagaagaggtgttaaa

SEQ ID NO: 23378 - RNA, 20 nt, synthetic construct
  source 1..20: mol_type = other RNA
cccaagacattggactaaaa

SEQ ID NO: 23379 - RNA, 20 nt, synthetic construct
  source 1..20: mol_type = other RNA
tttcatcccaagacattgga

SEQ ID NO: 23380 - RNA, 20 nt, synthetic construct
  source 1..20: mol_type = other RNA
aagtggcccacctgtcattt

SEQ ID NO: 23381 - RNA, 20 nt, synthetic construct
  source 1..20: mol_type = other RNA
agccctccgcccagatgcct

SEQ ID NO: 23382 - RNA, 20 nt, synthetic construct
  source 1..20: mol_type = other RNA
catttctgaacgtcagactg

SEQ ID NO: 23383 - RNA, 20 nt, synthetic construct
  source 1..20: mol_type = other RNA
ttctgaacgtcagactgttg

SEQ ID NO: 23384 - RNA, 20 nt, synthetic construct
  source 1..20: mol_type = other RNA
caaaaaaactctccctgcaa

SEQ ID NO: 23385 - RNA, 20 nt, synthetic construct
  source 1..20: mol_type = other RNA
cactaaccagtcaccagttg

SEQ ID NO: 23386 - RNA, 20 nt, synthetic construct
  source 1..20: mol_type = other RNA
cactagcctcatcactaacc

SEQ ID NO: 23387 - RNA, 20 nt, synthetic construct
  source 1..20: mol_type = other RNA
actccagacacctggctgac

SEQ ID NO: 23388 - RNA, 20 nt, synthetic construct
  source 1..20: mol_type = other RNA
acaggctttcccacaggtcc

SEQ ID NO: 23389 - RNA, 20 nt, synthetic construct
  source 1..20: mol_type = other RNA
taccctttcatacaggcttt

SEQ ID NO: 23390 - RNA, 20 nt, synthetic construct
  source 1..20: mol_type = other RNA
cattaccctttcatacaggc

SEQ ID NO: 23391 - RNA, 20 nt, synthetic construct
  source 1..20: mol_type = other RNA
aggagctcaattttattggc

SEQ ID NO: 23392 - RNA, 20 nt, synthetic construct
  source 1..20: mol_type = other RNA
cagtctctgggttcaaagca

SEQ ID NO: 23393 - RNA, 20 nt, synthetic construct
  source 1..20: mol_type = other RNA
ctggaattgagggagggggc

SEQ ID NO: 23394 - RNA, 20 nt, synthetic construct
  source 1..20: mol_type = other RNA
gccttggaggacccagcagg

SEQ ID NO: 23395 - RNA, 20 nt, synthetic construct
  source 1..20: mol_type = other RNA
ggtaacacaggttttccatc

SEQ ID NO: 23396 - RNA, 20 nt, synthetic construct
  source 1..20: mol_type = other RNA
ctcaggggccatgtgccctc

SEQ ID NO: 23397 - RNA, 20 nt, synthetic construct
  source 1..20: mol_type = other RNA
cctacctccccgcctccccg

SEQ ID NO: 23398 - RNA, 20 nt, synthetic construct
  source 1..20: mol_type = other RNA
attccatctctaactctgga

SEQ ID NO: 23399 - RNA, 20 nt, synthetic construct
  source 1..20: mol_type = other RNA
ttgttggagtcaagttcctt

SEQ ID NO: 23400 - RNA, 20 nt, synthetic construct
  source 1..20: mol_type = other RNA
cccctaagggagccgggggt

SEQ ID NO: 23401 - RNA, 20 nt, synthetic construct
  source 1..20: mol_type = other RNA
ctccaaagaccctgcctcca

SEQ ID NO: 23402 - RNA, 20 nt, synthetic construct
  source 1..20: mol_type = other RNA
gtgtggggagcctgggattc

SEQ ID NO: 23403 - RNA, 20 nt, synthetic construct
  source 1..20: mol_type = other RNA
cccaggtgatgttcatgtgt

SEQ ID NO: 23404 - RNA, 20 nt, synthetic construct
  source 1..20: mol_type = other RNA
ctctttactctctccctgtt

SEQ ID NO: 23405 - RNA, 20 nt, synthetic construct
  source 1..20: mol_type = other RNA
gtcctaagacccagcctcag

SEQ ID NO: 23406 - RNA, 20 nt, synthetic construct
  source 1..20: mol_type = other RNA
gttttatccattttacagat

SEQ ID NO: 23407 - RNA, 20 nt, synthetic construct
  source 1..20: mol_type = other RNA
caagcaagctctcatgtttt

SEQ ID NO: 23408 - RNA, 20 nt, synthetic construct
  source 1..20: mol_type = other RNA
ctgtaaaatggataaaacat

SEQ ID NO: 23409 - RNA, 20 nt, synthetic construct
  source 1..20: mol_type = other RNA
gcattgggaataattattat

SEQ ID NO: 23410 - RNA, 20 nt, synthetic construct
  source 1..20: mol_type = other RNA
aggaaggacatagatagttt

SEQ ID NO: 23411 - RNA, 20 nt, synthetic construct
  source 1..20: mol_type = other RNA
ggtaaaatacatataacata

SEQ ID NO: 23412 - RNA, 20 nt, synthetic construct
  source 1..20: mol_type = other RNA
cctcccaaactgaaactcta

SEQ ID NO: 23413 - RNA, 20 nt, synthetic construct
  source 1..20: mol_type = other RNA
ccatgtcgtgccatgtgtaa

SEQ ID NO: 23414 - RNA, 20 nt, synthetic construct
  source 1..20: mol_type = other RNA
ccattcatttgttgatagac

SEQ ID NO: 23415 - RNA, 20 nt, synthetic construct
  source 1..20: mol_type = other RNA
ttgttgatagacacttgggt

SEQ ID NO: 23416 - RNA, 20 nt, synthetic construct
  source 1..20: mol_type = other RNA
attgacatatcacctgttct

SEQ ID NO: 23417 - RNA, 20 nt, synthetic construct
  source 1..20: mol_type = other RNA
ccggtttcccaaactgcagg

SEQ ID NO: 23418 - RNA, 20 nt, synthetic construct
  source 1..20: mol_type = other RNA
cctgccttgacctcccaagg

SEQ ID NO: 23419 - RNA, 20 nt, synthetic construct
  source 1..20: mol_type = other RNA
gcctgtaattccatcacctt

SEQ ID NO: 23420 - RNA, 20 nt, synthetic construct
  source 1..20: mol_type = other RNA
tttttttgagacggagtttc

SEQ ID NO: 23421 - RNA, 20 nt, synthetic construct
  source 1..20: mol_type = other RNA
cttggggtctccagcaccca

SEQ ID NO: 23422 - RNA, 20 nt, synthetic construct
  source 1..20: mol_type = other RNA
cactccaccccctaccccag

SEQ ID NO: 23423 - RNA, 20 nt, synthetic construct
  source 1..20: mol_type = other RNA
tgactgcagttaggagtggc

SEQ ID NO: 23424 - RNA, 20 nt, synthetic construct
  source 1..20: mol_type = other RNA
acagctcatcttcattctca

SEQ ID NO: 23425 - RNA, 20 nt, synthetic construct
  source 1..20: mol_type = other RNA
cttcattctcatcctgggac

SEQ ID NO: 23426 - RNA, 20 nt, synthetic construct
  source 1..20: mol_type = other RNA
tctcatcctgggaccaccag

SEQ ID NO: 23427 - RNA, 20 nt, synthetic construct
  source 1..20: mol_type = other RNA
cctgggaccaccaggcccct

SEQ ID NO: 23428 - RNA, 20 nt, synthetic construct
  source 1..20: mol_type = other RNA
ctccagcttgtgcatttgcc

SEQ ID NO: 23429 - RNA, 20 nt, synthetic construct
  source 1..20: mol_type = other RNA
aacaacttggaaaatcttaa

SEQ ID NO: 23430 - RNA, 20 nt, synthetic construct
  source 1..20: mol_type = other RNA
gggggaggctatgcctgtat

SEQ ID NO: 23431 - RNA, 20 nt, synthetic construct
  source 1..20: mol_type = other RNA
ctacctccgtcctcccatac

SEQ ID NO: 23432 - RNA, 20 nt, synthetic construct
  source 1..20: mol_type = other RNA
catgggggaggctatgcctg

SEQ ID NO: 23433 - RNA, 20 nt, synthetic construct
  source 1..20: mol_type = other RNA
tgattataacaaatgtatca

SEQ ID NO: 23434 - RNA, 20 nt, synthetic construct
  source 1..20: mol_type = other RNA
gtaaacaaaccatggacctt

SEQ ID NO: 23435 - RNA, 20 nt, synthetic construct
  source 1..20: mol_type = other RNA
tattacccaaggtccatggt

SEQ ID NO: 23436 - RNA, 20 nt, synthetic construct
  source 1..20: mol_type = other RNA
gtatctgtccaaacccacag

SEQ ID NO: 23437 - RNA, 20 nt, synthetic construct
  source 1..20: mol_type = other RNA
atacattacatcatgtatct

SEQ ID NO: 23438 - RNA, 20 nt, synthetic construct
  source 1..20: mol_type = other RNA
ttcacttgtgactgagcttg

SEQ ID NO: 23439 - RNA, 20 nt, synthetic construct
  source 1..20: mol_type = other RNA
aaatgaaaggatgaatgaat

SEQ ID NO: 23440 - RNA, 20 nt, synthetic construct
  source 1..20: mol_type = other RNA
tcattcattcatcctttcat

SEQ ID NO: 23441 - RNA, 20 nt, synthetic construct
  source 1..20: mol_type = other RNA
tcattcatcctttcatttat

SEQ ID NO: 23442 - RNA, 20 nt, synthetic construct
  source 1..20: mol_type = other RNA
tcatcctttcatttatgaga

SEQ ID NO: 23443 - RNA, 20 nt, synthetic construct
  source 1..20: mol_type = other RNA
cctttcatttatgagacaaa

SEQ ID NO: 23444 - RNA, 20 nt, synthetic construct
  source 1..20: mol_type = other RNA
ttatgagacaaagtctcact

SEQ ID NO: 23445 - RNA, 20 nt, synthetic construct
  source 1..20: mol_type = other RNA
tgctcactgcagcctcaagc

SEQ ID NO: 23446 - RNA, 20 nt, synthetic construct
  source 1..20: mol_type = other RNA
cctccctcctcagcctccca

SEQ ID NO: 23447 - RNA, 20 nt, synthetic construct
  source 1..20: mol_type = other RNA
tatggcccctttggtatttg

SEQ ID NO: 23448 - RNA, 20 nt, synthetic construct
  source 1..20: mol_type = other RNA
ctgacctcctgcccccatta

SEQ ID NO: 23449 - RNA, 20 nt, synthetic construct
  source 1..20: mol_type = other RNA
ttgtcctcaaggcagggaga

SEQ ID NO: 23450 - RNA, 20 nt, synthetic construct
  source 1..20: mol_type = other RNA
ggggtgaggttggtacctct

SEQ ID NO: 23451 - RNA, 20 nt, synthetic construct
  source 1..20: mol_type = other RNA
agtgtaccatgacctgggct

SEQ ID NO: 23452 - RNA, 20 nt, synthetic construct
  source 1..20: mol_type = other RNA
gtgaaccaaagatcatagtg

SEQ ID NO: 23453 - RNA, 20 nt, synthetic construct
  source 1..20: mol_type = other RNA
ggtacactatgatctttggt

SEQ ID NO: 23454 - RNA, 20 nt, synthetic construct
  source 1..20: mol_type = other RNA
taatgtccctatttcccata

SEQ ID NO: 23455 - RNA, 20 nt, synthetic construct
  source 1..20: mol_type = other RNA
gtagaatatctaaggatatg

SEQ ID NO: 23456 - RNA, 20 nt, synthetic construct
  source 1..20: mol_type = other RNA
ctgggtctacattgcaagcc

SEQ ID NO: 23457 - RNA, 20 nt, synthetic construct
  source 1..20: mol_type = other RNA
tgttttacagctttagaggg

SEQ ID NO: 23458 - RNA, 20 nt, synthetic construct
  source 1..20: mol_type = other RNA
gcaccctgtagtcctccaga

SEQ ID NO: 23459 - RNA, 20 nt, synthetic construct
  source 1..20: mol_type = other RNA
ttgagctactacccccacaa

SEQ ID NO: 23460 - RNA, 20 nt, synthetic construct
  source 1..20: mol_type = other RNA
ggtagataggcattcctagg

SEQ ID NO: 23461 - RNA, 20 nt, synthetic construct
  source 1..20: mol_type = other RNA
gacaagctgcttccgggggc

SEQ ID NO: 23462 - RNA, 20 nt, synthetic construct
  source 1..20: mol_type = other RNA
gaggttggggagcaggttgg

SEQ ID NO: 23463 - RNA, 20 nt, synthetic construct
  source 1..20: mol_type = other RNA
ggtcaagagtagggaagtat

SEQ ID NO: 23464 - RNA, 20 nt, synthetic construct
  source 1..20: mol_type = other RNA
ttttgtatttttgcagagac

SEQ ID NO: 23465 - RNA, 20 nt, synthetic construct
  source 1..20: mol_type = other RNA
gctctttaatcacagttcag

SEQ ID NO: 23466 - RNA, 20 nt, synthetic construct
  source 1..20: mol_type = other RNA
tagatgttttcttcccagag

SEQ ID NO: 23467 - RNA, 20 nt, synthetic construct
  source 1..20: mol_type = other RNA
cacgcatattgtactcacca

SEQ ID NO: 23468 - RNA, 20 nt, synthetic construct
  source 1..20: mol_type = other RNA
tgagcacttactggtcgcca

SEQ ID NO: 23469 - RNA, 20 nt, synthetic construct
  source 1..20: mol_type = other RNA
aggattaggggagttaagtt

SEQ ID NO: 23470 - RNA, 20 nt, synthetic construct
  source 1..20: mol_type = other RNA
tttttaaaccacttggagcc

SEQ ID NO: 23471 - RNA, 20 nt, synthetic construct
  source 1..20: mol_type = other RNA
ctcccaccagctgagatgga

SEQ ID NO: 23472 - RNA, 20 nt, synthetic construct
  source 1..20: mol_type = other RNA
ccccacttcacactgcatgc

SEQ ID NO: 23473 - RNA, 20 nt, synthetic construct
  source 1..20: mol_type = other RNA
ctgaaaaacaggaatacaaa

SEQ ID NO: 23474 - RNA, 20 nt, synthetic construct
  source 1..20: mol_type = other RNA
gtcatttggtacctggcact

SEQ ID NO: 23475 - RNA, 20 nt, synthetic construct
  source 1..20: mol_type = other RNA
ttggtacctggcacttgctg

SEQ ID NO: 23476 - RNA, 20 nt, synthetic construct
  source 1..20: mol_type = other RNA
ccgtggcaatgatatagaac

SEQ ID NO: 23477 - RNA, 20 nt, synthetic construct
  source 1..20: mol_type = other RNA
tgccacggatgaagagaggc

SEQ ID NO: 23478 - RNA, 20 nt, synthetic construct
  source 1..20: mol_type = other RNA
cccgtggcaggagagagagc

SEQ ID NO: 23479 - RNA, 20 nt, synthetic construct
  source 1..20: mol_type = other RNA
tggactgtttctccaaacca

SEQ ID NO: 23480 - RNA, 20 nt, synthetic construct
  source 1..20: mol_type = other RNA
cagaaggccaagggagttct

SEQ ID NO: 23481 - RNA, 20 nt, synthetic construct
  source 1..20: mol_type = other RNA
tctccagaactaatattggg

SEQ ID NO: 23482 - RNA, 20 nt, synthetic construct
  source 1..20: mol_type = other RNA
gtggtttaggagcttgcatc

SEQ ID NO: 23483 - RNA, 20 nt, synthetic construct
  source 1..20: mol_type = other RNA
tggctcaacctggacaagaa

SEQ ID NO: 23484 - RNA, 20 nt, synthetic construct
  source 1..20: mol_type = other RNA
aggaacaagaagggccccat

SEQ ID NO: 23485 - RNA, 20 nt, synthetic construct
  source 1..20: mol_type = other RNA
tattagtttgcttcttacgt

SEQ ID NO: 23486 - RNA, 20 nt, synthetic construct
  source 1..20: mol_type = other RNA
tcagcacttactgattgcca

SEQ ID NO: 23487 - RNA, 20 nt, synthetic construct
  source 1..20: mol_type = other RNA
tttttaaaccacttggagcc

SEQ ID NO: 23488 - RNA, 20 nt, synthetic construct
  source 1..20: mol_type = other RNA
ccagagtttgaagcagagct

SEQ ID NO: 23489 - RNA, 20 nt, synthetic construct
  source 1..20: mol_type = other RNA
caataagtgggggtgggcta

SEQ ID NO: 23490 - RNA, 20 nt, synthetic construct
  source 1..20: mol_type = other RNA
agcctgtcggtggctgcccc

SEQ ID NO: 23491 - RNA, 20 nt, synthetic construct
  source 1..20: mol_type = other RNA
ctgcagagtgaaggaaagag

SEQ ID NO: 23492 - RNA, 20 nt, synthetic construct
  source 1..20: mol_type = other RNA
tttatagatatggcccaaag

SEQ ID NO: 23493 - RNA, 20 nt, synthetic construct
  source 1..20: mol_type = other RNA
tcacggagttgctaggatca

SEQ ID NO: 23494 - RNA, 20 nt, synthetic construct
  source 1..20: mol_type = other RNA
ggttggctgggatctcgctg

SEQ ID NO: 23495 - RNA, 20 nt, synthetic construct
  source 1..20: mol_type = other RNA
gacggttgagcgggggctgc

SEQ ID NO: 23496 - RNA, 20 nt, synthetic construct
  source 1..20: mol_type = other RNA
gaacaagtgggcccagccag

SEQ ID NO: 23497 - RNA, 20 nt, synthetic construct
  source 1..20: mol_type = other RNA
tctctgtgacatccgggggt

SEQ ID NO: 23498 - RNA, 20 nt, synthetic construct
  source 1..20: mol_type = other RNA
gagaaaacacacactcaact

SEQ ID NO: 23499 - RNA, 20 nt, synthetic construct
  source 1..20: mol_type = other RNA
gagcttactcttcaatgtat

SEQ ID NO: 23500 - RNA, 20 nt, synthetic construct
  source 1..20: mol_type = other RNA
ctgcatgtcatgtgtggtgg

SEQ ID NO: 23501 - RNA, 20 nt, synthetic construct
  source 1..20: mol_type = other RNA
gtgtggtgggttgaaaggtg

SEQ ID NO: 23502 - RNA, 20 nt, synthetic construct
  source 1..20: mol_type = other RNA
gcctgtaatcccagcacttt

SEQ ID NO: 23503 - RNA, 20 nt, synthetic construct
  source 1..20: mol_type = other RNA
ggtggtgagcacctgtaatc

SEQ ID NO: 23504 - RNA, 20 nt, synthetic construct
  source 1..20: mol_type = other RNA
ttcaagatctttaattcttt

SEQ ID NO: 23505 - RNA, 20 nt, synthetic construct
  source 1..20: mol_type = other RNA
tggatttaggacccacctag

SEQ ID NO: 23506 - RNA, 20 nt, synthetic construct
  source 1..20: mol_type = other RNA
cctggattatctaggtgggt

SEQ ID NO: 23507 - RNA, 20 nt, synthetic construct
  source 1..20: mol_type = other RNA
gtagcaagtctctttctctt

SEQ ID NO: 23508 - RNA, 20 nt, synthetic construct
  source 1..20: mol_type = other RNA
ggttctggaggccagaagtt

SEQ ID NO: 23509 - RNA, 20 nt, synthetic construct
  source 1..20: mol_type = other RNA
ttcccagggctgctgaaaca

SEQ ID NO: 23510 - RNA, 20 nt, synthetic construct
  source 1..20: mol_type = other RNA
ctgtgtggctctaaggctcc

SEQ ID NO: 23511 - RNA, 20 nt, synthetic construct
  source 1..20: mol_type = other RNA
gtagctcttgctggggaaag

SEQ ID NO: 23512 - RNA, 20 nt, synthetic construct
  source 1..20: mol_type = other RNA
ctgccaatggagacaataat

SEQ ID NO: 23513 - RNA, 20 nt, synthetic construct
  source 1..20: mol_type = other RNA
gcctgtaatcccaacacttt

SEQ ID NO: 23514 - RNA, 20 nt, synthetic construct
  source 1..20: mol_type = other RNA
caccccctaaagaaactcca

SEQ ID NO: 23515 - RNA, 20 nt, synthetic construct
  source 1..20: mol_type = other RNA
gcctgaaatcccagcacttt

SEQ ID NO: 23516 - RNA, 20 nt, synthetic construct
  source 1..20: mol_type = other RNA
ttcaaataaatagaatcata

SEQ ID NO: 23517 - RNA, 20 nt, synthetic construct
  source 1..20: mol_type = other RNA
acaatatgtgaccctttgtg

SEQ ID NO: 23518 - RNA, 20 nt, synthetic construct
  source 1..20: mol_type = other RNA
ccatgttccagcatgtatca

SEQ ID NO: 23519 - RNA, 20 nt, synthetic construct
  source 1..20: mol_type = other RNA
attatgtattaataaaacaa

SEQ ID NO: 23520 - RNA, 20 nt, synthetic construct
  source 1..20: mol_type = other RNA
tataccttctatgcatgtaa

SEQ ID NO: 23521 - RNA, 20 nt, synthetic construct
  source 1..20: mol_type = other RNA
gtcaggatatttgaggtatc

SEQ ID NO: 23522 - RNA, 20 nt, synthetic construct
  source 1..20: mol_type = other RNA
ttaatctttaaacaatccca

SEQ ID NO: 23523 - RNA, 20 nt, synthetic construct
  source 1..20: mol_type = other RNA
ttgttgaagggcatattaaa

SEQ ID NO: 23524 - RNA, 20 nt, synthetic construct
  source 1..20: mol_type = other RNA
catttgttgaagggcatatt

SEQ ID NO: 23525 - RNA, 20 nt, synthetic construct
  source 1..20: mol_type = other RNA
atgcaaagtgaggataataa

SEQ ID NO: 23526 - RNA, 20 nt, synthetic construct
  source 1..20: mol_type = other RNA
atcagtaaccatgtaaggaa

SEQ ID NO: 23527 - RNA, 20 nt, synthetic construct
  source 1..20: mol_type = other RNA
gtgcctggcgtataggaggt

SEQ ID NO: 23528 - RNA, 20 nt, synthetic construct
  source 1..20: mol_type = other RNA
ggcattgccaaatgtgggac

SEQ ID NO: 23529 - RNA, 20 nt, synthetic construct
  source 1..20: mol_type = other RNA
atggttgtaagttccttgga

SEQ ID NO: 23530 - RNA, 20 nt, synthetic construct
  source 1..20: mol_type = other RNA
tcagcacctcttatatgctc

SEQ ID NO: 23531 - RNA, 20 nt, synthetic construct
  source 1..20: mol_type = other RNA
ccccagccctcaccagctgg

SEQ ID NO: 23532 - RNA, 20 nt, synthetic construct
  source 1..20: mol_type = other RNA
agaagtggtagaggcacagg

SEQ ID NO: 23533 - RNA, 20 nt, synthetic construct
  source 1..20: mol_type = other RNA
ccccatctgcagagagcgtc

SEQ ID NO: 23534 - RNA, 20 nt, synthetic construct
  source 1..20: mol_type = other RNA
ccaagggacttttcctccca

SEQ ID NO: 23535 - RNA, 20 nt, synthetic construct
  source 1..20: mol_type = other RNA
caccttccatgtcacacaac

SEQ ID NO: 23536 - RNA, 20 nt, synthetic construct
  source 1..20: mol_type = other RNA
gatgaatgggtgatattgac

SEQ ID NO: 23537 - RNA, 20 nt, synthetic construct
  source 1..20: mol_type = other RNA
catgagccacgtcagtcccc

SEQ ID NO: 23538 - RNA, 20 nt, synthetic construct
  source 1..20: mol_type = other RNA
gagccacgtcagtcccctcc

SEQ ID NO: 23539 - RNA, 20 nt, synthetic construct
  source 1..20: mol_type = other RNA
tgcaagggggatgcggagca

SEQ ID NO: 23540 - RNA, 20 nt, synthetic construct
  source 1..20: mol_type = other RNA
tagtgaaggggcctatttcc

SEQ ID NO: 23541 - RNA, 20 nt, synthetic construct
  source 1..20: mol_type = other RNA
gtttacatcctccacctcca

SEQ ID NO: 23542 - RNA, 20 nt, synthetic construct
  source 1..20: mol_type = other RNA
agtatgctcattgctgtcca

SEQ ID NO: 23543 - RNA, 20 nt, synthetic construct
  source 1..20: mol_type = other RNA
tgctgtccatacattatcat

SEQ ID NO: 23544 - RNA, 20 nt, synthetic construct
  source 1..20: mol_type = other RNA
ctggaatccttacaacaaca

SEQ ID NO: 23545 - RNA, 20 nt, synthetic construct
  source 1..20: mol_type = other RNA
ttgtaaaagacagaaactaa

SEQ ID NO: 23546 - RNA, 20 nt, synthetic construct
  source 1..20: mol_type = other RNA
acagagcctatgttgaaata

SEQ ID NO: 23547 - RNA, 20 nt, synthetic construct
  source 1..20: mol_type = other RNA
accaaggaagaaaatggagg

SEQ ID NO: 23548 - RNA, 20 nt, synthetic construct
  source 1..20: mol_type = other RNA
gtttcagaaattacagaact

SEQ ID NO: 23549 - RNA, 20 nt, synthetic construct
  source 1..20: mol_type = other RNA
taaggatttgggcatgtcat

SEQ ID NO: 23550 - RNA, 20 nt, synthetic construct
  source 1..20: mol_type = other RNA
aggatttgggtgtttttctc

SEQ ID NO: 23551 - RNA, 20 nt, synthetic construct
  source 1..20: mol_type = other RNA
aaaaccactagtcttactcc

SEQ ID NO: 23552 - RNA, 20 nt, synthetic construct
  source 1..20: mol_type = other RNA
ggattagtggataaacaggt

SEQ ID NO: 23553 - RNA, 20 nt, synthetic construct
  source 1..20: mol_type = other RNA
caaggaaaagccccagtcac

SEQ ID NO: 23554 - RNA, 20 nt, synthetic construct
  source 1..20: mol_type = other RNA
gtataaatgtaatcccctat

SEQ ID NO: 23555 - RNA, 20 nt, synthetic construct
  source 1..20: mol_type = other RNA
aacaggcagcttcacccaag

SEQ ID NO: 23556 - RNA, 20 nt, synthetic construct
  source 1..20: mol_type = other RNA
atttcaggatgctgcaaaag

SEQ ID NO: 23557 - RNA, 20 nt, synthetic construct
  source 1..20: mol_type = other RNA
tattatcaccatcattatta

SEQ ID NO: 23558 - RNA, 20 nt, synthetic construct
  source 1..20: mol_type = other RNA
tattatcatcttcattttca

SEQ ID NO: 23559 - RNA, 20 nt, synthetic construct
  source 1..20: mol_type = other RNA
cttcattttcatcaccttca

SEQ ID NO: 23560 - RNA, 20 nt, synthetic construct
  source 1..20: mol_type = other RNA
tttcatcaccttcattatgg

SEQ ID NO: 23561 - RNA, 20 nt, synthetic construct
  source 1..20: mol_type = other RNA
caccttcattatggccatca

SEQ ID NO: 23562 - RNA, 20 nt, synthetic construct
  source 1..20: mol_type = other RNA
tatggccatcattccattcc

SEQ ID NO: 23563 - RNA, 20 nt, synthetic construct
  source 1..20: mol_type = other RNA
tccattcctcagctcagaag

SEQ ID NO: 23564 - RNA, 20 nt, synthetic construct
  source 1..20: mol_type = other RNA
gctggggaaagttaggactt

SEQ ID NO: 23565 - RNA, 20 nt, synthetic construct
  source 1..20: mol_type = other RNA
ctttcaaggcctggttccag

SEQ ID NO: 23566 - RNA, 20 nt, synthetic construct
  source 1..20: mol_type = other RNA
gtcatggtgcctatattcca

SEQ ID NO: 23567 - RNA, 20 nt, synthetic construct
  source 1..20: mol_type = other RNA
ggtgcctatattccaagggc

SEQ ID NO: 23568 - RNA, 20 nt, synthetic construct
  source 1..20: mol_type = other RNA
ctgtgtaagatgaataaata

SEQ ID NO: 23569 - RNA, 20 nt, synthetic construct
  source 1..20: mol_type = other RNA
cttacacagatgagaaaatg

SEQ ID NO: 23570 - RNA, 20 nt, synthetic construct
  source 1..20: mol_type = other RNA
ggatacatacctcatccttt

SEQ ID NO: 23571 - RNA, 20 nt, synthetic construct
  source 1..20: mol_type = other RNA
ccttttgattagattaaggg

SEQ ID NO: 23572 - RNA, 20 nt, synthetic construct
  source 1..20: mol_type = other RNA
tcatttgtttgatcattcat

SEQ ID NO: 23573 - RNA, 20 nt, synthetic construct
  source 1..20: mol_type = other RNA
ttgtttgatcattcattcat

SEQ ID NO: 23574 - RNA, 20 nt, synthetic construct
  source 1..20: mol_type = other RNA
tcattcattcaacaaacatt

SEQ ID NO: 23575 - RNA, 20 nt, synthetic construct
  source 1..20: mol_type = other RNA
tcattcaacaaacatttctt

SEQ ID NO: 23576 - RNA, 20 nt, synthetic construct
  source 1..20: mol_type = other RNA
tcaacaaacatttcttgagt

SEQ ID NO: 23577 - RNA, 20 nt, synthetic construct
  source 1..20: mol_type = other RNA
tgatgggcagtcagacccct

SEQ ID NO: 23578 - RNA, 20 nt, synthetic construct
  source 1..20: mol_type = other RNA
tgattgtgtgagttggtctc

SEQ ID NO: 23579 - RNA, 20 nt, synthetic construct
  source 1..20: mol_type = other RNA
ctggtcctatgtgctctact

SEQ ID NO: 23580 - RNA, 20 nt, synthetic construct
  source 1..20: mol_type = other RNA
ggccctgataaccctccaat

SEQ ID NO: 23581 - RNA, 20 nt, synthetic construct
  source 1..20: mol_type = other RNA
agtgggtttggagagggagg

SEQ ID NO: 23582 - RNA, 20 nt, synthetic construct
  source 1..20: mol_type = other RNA
taccatctggacatatttta

SEQ ID NO: 23583 - RNA, 20 nt, synthetic construct
  source 1..20: mol_type = other RNA
tcaacagatatctactgagg

SEQ ID NO: 23584 - RNA, 20 nt, synthetic construct
  source 1..20: mol_type = other RNA
accctgtgtgcgattcacct

SEQ ID NO: 23585 - RNA, 20 nt, synthetic construct
  source 1..20: mol_type = other RNA
ttgcatggaaaattaaagca

SEQ ID NO: 23586 - RNA, 20 nt, synthetic construct
  source 1..20: mol_type = other RNA
ttacttcattactccctgtc

SEQ ID NO: 23587 - RNA, 20 nt, synthetic construct
  source 1..20: mol_type = other RNA
tactccctgtctgggaggtc

SEQ ID NO: 23588 - RNA, 20 nt, synthetic construct
  source 1..20: mol_type = other RNA
ttgataaatatttcccccca

SEQ ID NO: 23589 - RNA, 20 nt, synthetic construct
  source 1..20: mol_type = other RNA
agtaccattctttcactttt

SEQ ID NO: 23590 - RNA, 20 nt, synthetic construct
  source 1..20: mol_type = other RNA
cttatcacatctctattcat

SEQ ID NO: 23591 - RNA, 20 nt, synthetic construct
  source 1..20: mol_type = other RNA
ctgtccatccctctatccat

SEQ ID NO: 23592 - RNA, 20 nt, synthetic construct
  source 1..20: mol_type = other RNA
tatatttttggtacatttca

SEQ ID NO: 23593 - RNA, 20 nt, synthetic construct
  source 1..20: mol_type = other RNA
ctacccaacgaaacactgca

SEQ ID NO: 23594 - RNA, 20 nt, synthetic construct
  source 1..20: mol_type = other RNA
agatgtgagatcaaaggttc

SEQ ID NO: 23595 - RNA, 20 nt, synthetic construct
  source 1..20: mol_type = other RNA
aggttctattctgccccagc

SEQ ID NO: 23596 - RNA, 20 nt, synthetic construct
  source 1..20: mol_type = other RNA
cttctcagccctggctgcag

SEQ ID NO: 23597 - RNA, 20 nt, synthetic construct
  source 1..20: mol_type = other RNA
cagctcttcatggagcccct

SEQ ID NO: 23598 - RNA, 20 nt, synthetic construct
  source 1..20: mol_type = other RNA
ggagccccttctctgtgcca

SEQ ID NO: 23599 - RNA, 20 nt, synthetic construct
  source 1..20: mol_type = other RNA
ctaccatggtgagtgcgggg

SEQ ID NO: 23600 - RNA, 20 nt, synthetic construct
  source 1..20: mol_type = other RNA
cctccccatactccatgcac

SEQ ID NO: 23601 - RNA, 20 nt, synthetic construct
  source 1..20: mol_type = other RNA
gagaaggtgctagggcacca

SEQ ID NO: 23602 - RNA, 20 nt, synthetic construct
  source 1..20: mol_type = other RNA
gatcctccctccccagcaca

SEQ ID NO: 23603 - RNA, 20 nt, synthetic construct
  source 1..20: mol_type = other RNA
gcacccagaccacctcagga

SEQ ID NO: 23604 - RNA, 20 nt, synthetic construct
  source 1..20: mol_type = other RNA
tagcttattagtgagcatgt

SEQ ID NO: 23605 - RNA, 20 nt, synthetic construct
  source 1..20: mol_type = other RNA
ccctgacagcccaaacacac

SEQ ID NO: 23606 - RNA, 20 nt, synthetic construct
  source 1..20: mol_type = other RNA
tttcctagatatcaggaact

SEQ ID NO: 23607 - RNA, 20 nt, synthetic construct
  source 1..20: mol_type = other RNA
aaggaacttagggcaggtac

SEQ ID NO: 23608 - RNA, 20 nt, synthetic construct
  source 1..20: mol_type = other RNA
gtttgctcgggaggtcaggg

SEQ ID NO: 23609 - RNA, 20 nt, synthetic construct
  source 1..20: mol_type = other RNA
gtttaggggtcagtcgggac

SEQ ID NO: 23610 - RNA, 20 nt, synthetic construct
  source 1..20: mol_type = other RNA
gtttaaaaaagaaaatcgca

SEQ ID NO: 23611 - RNA, 20 nt, synthetic construct
  source 1..20: mol_type = other RNA
gggctgagtttcccaagatg

SEQ ID NO: 23612 - RNA, 20 nt, synthetic construct
  source 1..20: mol_type = other RNA
tcacttgacacttattcaac

SEQ ID NO: 23613 - RNA, 20 nt, synthetic construct
  source 1..20: mol_type = other RNA
ttatttattcattcattcat

SEQ ID NO: 23614 - RNA, 20 nt, synthetic construct
  source 1..20: mol_type = other RNA
tcattcattcattcacttat

SEQ ID NO: 23615 - RNA, 20 nt, synthetic construct
  source 1..20: mol_type = other RNA
tcattcattcacttatttga

SEQ ID NO: 23616 - RNA, 20 nt, synthetic construct
  source 1..20: mol_type = other RNA
tcattcacttatttgattat

SEQ ID NO: 23617 - RNA, 20 nt, synthetic construct
  source 1..20: mol_type = other RNA
tcacttatttgattatgcca

SEQ ID NO: 23618 - RNA, 20 nt, synthetic construct
  source 1..20: mol_type = other RNA
ttcaccattcactccaccac

SEQ ID NO: 23619 - RNA, 20 nt, synthetic construct
  source 1..20: mol_type = other RNA
tctctcagcctgacaatgaa

SEQ ID NO: 23620 - RNA, 20 nt, synthetic construct
  source 1..20: mol_type = other RNA
tcattctctcagcctgacaa

SEQ ID NO: 23621 - RNA, 20 nt, synthetic construct
  source 1..20: mol_type = other RNA
tcgcttgcccctcattcatt

SEQ ID NO: 23622 - RNA, 20 nt, synthetic construct
  source 1..20: mol_type = other RNA
cattcgcttgcccctcattc

SEQ ID NO: 23623 - RNA, 20 nt, synthetic construct
  source 1..20: mol_type = other RNA
tgtcaggctgagagaatgaa

SEQ ID NO: 23624 - RNA, 20 nt, synthetic construct
  source 1..20: mol_type = other RNA
ccactcactcacttcatcat

SEQ ID NO: 23625 - RNA, 20 nt, synthetic construct
  source 1..20: mol_type = other RNA
caacttctcacttcatccac

SEQ ID NO: 23626 - RNA, 20 nt, synthetic construct
  source 1..20: mol_type = other RNA
taacatctcacacaatccca

SEQ ID NO: 23627 - RNA, 20 nt, synthetic construct
  source 1..20: mol_type = other RNA
ctggaaaatggggataatat

SEQ ID NO: 23628 - RNA, 20 nt, synthetic construct
  source 1..20: mol_type = other RNA
gggagggagtgttaagagtt

SEQ ID NO: 23629 - RNA, 20 nt, synthetic construct
  source 1..20: mol_type = other RNA
ttactcactaagctttttct

SEQ ID NO: 23630 - RNA, 20 nt, synthetic construct
  source 1..20: mol_type = other RNA
tccttcatttactcactaag

SEQ ID NO: 23631 - RNA, 20 nt, synthetic construct
  source 1..20: mol_type = other RNA
cgtctctcttgtttaagtgt

SEQ ID NO: 23632 - RNA, 20 nt, synthetic construct
  source 1..20: mol_type = other RNA
ttccacacccattccttcac

SEQ ID NO: 23633 - RNA, 20 nt, synthetic construct
  source 1..20: mol_type = other RNA
tagttcactcatttccacac

SEQ ID NO: 23634 - RNA, 20 nt, synthetic construct
  source 1..20: mol_type = other RNA
tcattagttcactcatttcc

SEQ ID NO: 23635 - RNA, 20 nt, synthetic construct
  source 1..20: mol_type = other RNA
tcagtcacccaccactcatt

SEQ ID NO: 23636 - RNA, 20 nt, synthetic construct
  source 1..20: mol_type = other RNA
ttgcttcattcagtcaccca

SEQ ID NO: 23637 - RNA, 20 nt, synthetic construct
  source 1..20: mol_type = other RNA
catttgcttcattcagtcac

SEQ ID NO: 23638 - RNA, 20 nt, synthetic construct
  source 1..20: mol_type = other RNA
ggtccaccacagcttcaacc

SEQ ID NO: 23639 - RNA, 20 nt, synthetic construct
  source 1..20: mol_type = other RNA
gcgatcctcctgactccacc

SEQ ID NO: 23640 - RNA, 20 nt, synthetic construct
  source 1..20: mol_type = other RNA
ttacatctgttccccacaca

SEQ ID NO: 23641 - RNA, 20 nt, synthetic construct
  source 1..20: mol_type = other RNA
cggccgccacgagtggctgt

SEQ ID NO: 23642 - RNA, 20 nt, synthetic construct
  source 1..20: mol_type = other RNA
cctagacggcttcgaggagc

SEQ ID NO: 23643 - RNA, 20 nt, synthetic construct
  source 1..20: mol_type = other RNA
ccctgagctctcaaagtagc

SEQ ID NO: 23644 - RNA, 20 nt, synthetic construct
  source 1..20: mol_type = other RNA
agggcctcttcttccttggg

SEQ ID NO: 23645 - RNA, 20 nt, synthetic construct
  source 1..20: mol_type = other RNA
cttaaaaatggagagaatcc

SEQ ID NO: 23646 - RNA, 20 nt, synthetic construct
  source 1..20: mol_type = other RNA
cctgacagtggtggagtgtc

SEQ ID NO: 23647 - RNA, 20 nt, synthetic construct
  source 1..20: mol_type = other RNA
taagtcggtctgcaatctgc

SEQ ID NO: 23648 - RNA, 20 nt, synthetic construct
  source 1..20: mol_type = other RNA
ggaaggctttctgggaaagg

SEQ ID NO: 23649 - RNA, 20 nt, synthetic construct
  source 1..20: mol_type = other RNA
ggagctgcccttccattaag

SEQ ID NO: 23650 - RNA, 20 nt, synthetic construct
  source 1..20: mol_type = other RNA
gggcatttccagtgccccct

SEQ ID NO: 23651 - RNA, 20 nt, synthetic construct
  source 1..20: mol_type = other RNA
gtgcccaagtcttagctaaa

SEQ ID NO: 23652 - RNA, 20 nt, synthetic construct
  source 1..20: mol_type = other RNA
tcattccttcatcacacatt

SEQ ID NO: 23653 - RNA, 20 nt, synthetic construct
  source 1..20: mol_type = other RNA
tccttcatcacacattgttt

SEQ ID NO: 23654 - RNA, 20 nt, synthetic construct
  source 1..20: mol_type = other RNA
cacacattgtttgagcgcct

SEQ ID NO: 23655 - RNA, 20 nt, synthetic construct
  source 1..20: mol_type = other RNA
ggaaatgagcctcagattag

SEQ ID NO: 23656 - RNA, 20 nt, synthetic construct
  source 1..20: mol_type = other RNA
ttccatgaaagatacagtcc

SEQ ID NO: 23657 - RNA, 20 nt, synthetic construct
  source 1..20: mol_type = other RNA
agcttactgtagcttcggaa

SEQ ID NO: 23658 - RNA, 20 nt, synthetic construct
  source 1..20: mol_type = other RNA
ccggtgtgatgacgtgcacc

SEQ ID NO: 23659 - RNA, 20 nt, synthetic construct
  source 1..20: mol_type = other RNA
cacaccggatgattttttaa

SEQ ID NO: 23660 - RNA, 20 nt, synthetic construct
  source 1..20: mol_type = other RNA
gggacccatgggtaagggct

SEQ ID NO: 23661 - RNA, 20 nt, synthetic construct
  source 1..20: mol_type = other RNA
tcttaccctcttgcccacca

SEQ ID NO: 23662 - RNA, 20 nt, synthetic construct
  source 1..20: mol_type = other RNA
tcaagtgctcaatacctctg

SEQ ID NO: 23663 - RNA, 20 nt, synthetic construct
  source 1..20: mol_type = other RNA
tcccatcactcattcaacag

SEQ ID NO: 23664 - RNA, 20 nt, synthetic construct
  source 1..20: mol_type = other RNA
tcaacagaggtattgagcac

SEQ ID NO: 23665 - RNA, 20 nt, synthetic construct
  source 1..20: mol_type = other RNA
gaggacagcagcctcagtca

SEQ ID NO: 23666 - RNA, 20 nt, synthetic construct
  source 1..20: mol_type = other RNA
gagctgacagtctaatcaac

SEQ ID NO: 23667 - RNA, 20 nt, synthetic construct
  source 1..20: mol_type = other RNA
tccttatcctcactgaagct

SEQ ID NO: 23668 - RNA, 20 nt, synthetic construct
  source 1..20: mol_type = other RNA
agtggcatcctcctatggaa

SEQ ID NO: 23669 - RNA, 20 nt, synthetic construct
  source 1..20: mol_type = other RNA
cctagctgcacatcaaaagc

SEQ ID NO: 23670 - RNA, 20 nt, synthetic construct
  source 1..20: mol_type = other RNA
catctccccattgtacaaat

SEQ ID NO: 23671 - RNA, 20 nt, synthetic construct
  source 1..20: mol_type = other RNA
ctccccattgtacaaatggc

SEQ ID NO: 23672 - RNA, 20 nt, synthetic construct
  source 1..20: mol_type = other RNA
aaaggtcaggtcagcctggc

SEQ ID NO: 23673 - RNA, 20 nt, synthetic construct
  source 1..20: mol_type = other RNA
ttagctttttctgtggaagg

SEQ ID NO: 23674 - RNA, 20 nt, synthetic construct
  source 1..20: mol_type = other RNA
tagatgatctagacccctac

SEQ ID NO: 23675 - RNA, 20 nt, synthetic construct
  source 1..20: mol_type = other RNA
ctaatgattaggaaggagtt

SEQ ID NO: 23676 - RNA, 20 nt, synthetic construct
  source 1..20: mol_type = other RNA
accactgcattctagcctgg

SEQ ID NO: 23677 - RNA, 20 nt, synthetic construct
  source 1..20: mol_type = other RNA
taatctcaagagctactgtg

SEQ ID NO: 23678 - RNA, 20 nt, synthetic construct
  source 1..20: mol_type = other RNA
ctgtaaaatggggaagatga

SEQ ID NO: 23679 - RNA, 20 nt, synthetic construct
  source 1..20: mol_type = other RNA
catcttccccattttacaga

SEQ ID NO: 23680 - RNA, 20 nt, synthetic construct
  source 1..20: mol_type = other RNA
cttccccattttacagatga

SEQ ID NO: 23681 - RNA, 20 nt, synthetic construct
  source 1..20: mol_type = other RNA
ttttacctctggacaaattt

SEQ ID NO: 23682 - RNA, 20 nt, synthetic construct
  source 1..20: mol_type = other RNA
ctgtctgtcaaatcagggtt

SEQ ID NO: 23683 - RNA, 20 nt, synthetic construct
  source 1..20: mol_type = other RNA
gccttcacctcctctggtct

SEQ ID NO: 23684 - RNA, 20 nt, synthetic construct
  source 1..20: mol_type = other RNA
ttgaaaccgggaggcggagg

SEQ ID NO: 23685 - RNA, 20 nt, synthetic construct
  source 1..20: mol_type = other RNA
ccaagctggactgcagtggc

SEQ ID NO: 23686 - RNA, 20 nt, synthetic construct
  source 1..20: mol_type = other RNA
ggttaaaaaaaaaactccat

SEQ ID NO: 23687 - RNA, 20 nt, synthetic construct
  source 1..20: mol_type = other RNA
atggaaatatacagtggtga

SEQ ID NO: 23688 - RNA, 20 nt, synthetic construct
  source 1..20: mol_type = other RNA
tgtctcagacatcagcttgc

SEQ ID NO: 23689 - RNA, 20 nt, synthetic construct
  source 1..20: mol_type = other RNA
tccgaaatgttctcggcctc

SEQ ID NO: 23690 - RNA, 20 nt, synthetic construct
  source 1..20: mol_type = other RNA
tcaaacaaacaaataacaac

SEQ ID NO: 23691 - RNA, 20 nt, synthetic construct
  source 1..20: mol_type = other RNA
tctttggtaaaattatggtg

SEQ ID NO: 23692 - RNA, 20 nt, synthetic construct
  source 1..20: mol_type = other RNA
tctaatattgaaaaagttca

SEQ ID NO: 23693 - RNA, 20 nt, synthetic construct
  source 1..20: mol_type = other RNA
ccccttgaagtctgctctaa

SEQ ID NO: 23694 - RNA, 20 nt, synthetic construct
  source 1..20: mol_type = other RNA
ttactcctcaagactctgag

SEQ ID NO: 23695 - RNA, 20 nt, synthetic construct
  source 1..20: mol_type = other RNA
ggctcactgcatcctccacc

SEQ ID NO: 23696 - RNA, 20 nt, synthetic construct
  source 1..20: mol_type = other RNA
gtctgtaattccagcatttt

SEQ ID NO: 23697 - RNA, 20 nt, synthetic construct
  source 1..20: mol_type = other RNA
agccccccataagaggccag

SEQ ID NO: 23698 - RNA, 20 nt, synthetic construct
  source 1..20: mol_type = other RNA
tcagccccagggtggggcag

SEQ ID NO: 23699 - RNA, 20 nt, synthetic construct
  source 1..20: mol_type = other RNA
agctcactgcagcctcgaat

SEQ ID NO: 23700 - RNA, 20 nt, synthetic construct
  source 1..20: mol_type = other RNA
gtgccagccacattgaggat

SEQ ID NO: 23701 - RNA, 20 nt, synthetic construct
  source 1..20: mol_type = other RNA
cactcatgtgccagccacat

SEQ ID NO: 23702 - RNA, 20 nt, synthetic construct
  source 1..20: mol_type = other RNA
ctcatcactcatgtgccagc

SEQ ID NO: 23703 - RNA, 20 nt, synthetic construct
  source 1..20: mol_type = other RNA
ttgctgctctcagcaattca

SEQ ID NO: 23704 - RNA, 20 nt, synthetic construct
  source 1..20: mol_type = other RNA
gatggacttgaatccctgtt

SEQ ID NO: 23705 - RNA, 20 nt, synthetic construct
  source 1..20: mol_type = other RNA
gagttagactttgccctctg

SEQ ID NO: 23706 - RNA, 20 nt, synthetic construct
  source 1..20: mol_type = other RNA
cacctgggggctccaaccag

SEQ ID NO: 23707 - RNA, 20 nt, synthetic construct
  source 1..20: mol_type = other RNA
agcactatattctagcctgg

SEQ ID NO: 23708 - RNA, 20 nt, synthetic construct
  source 1..20: mol_type = other RNA
acctctgcagccttgaactc

SEQ ID NO: 23709 - RNA, 20 nt, synthetic construct
  source 1..20: mol_type = other RNA
ccattcactcattcacctat

SEQ ID NO: 23710 - RNA, 20 nt, synthetic construct
  source 1..20: mol_type = other RNA
tgaatggaaggatgaatggc

SEQ ID NO: 23711 - RNA, 20 nt, synthetic construct
  source 1..20: mol_type = other RNA
tcacctattcaatcagccat

SEQ ID NO: 23712 - RNA, 20 nt, synthetic construct
  source 1..20: mol_type = other RNA
ccttccattcaatgattcat

SEQ ID NO: 23713 - RNA, 20 nt, synthetic construct
  source 1..20: mol_type = other RNA
ccattcacttatgcagtcat

SEQ ID NO: 23714 - RNA, 20 nt, synthetic construct
  source 1..20: mol_type = other RNA
ttctttactccctcatccaa

SEQ ID NO: 23715 - RNA, 20 nt, synthetic construct
  source 1..20: mol_type = other RNA
ccaaccgctcactcaatcat

SEQ ID NO: 23716 - RNA, 20 nt, synthetic construct
  source 1..20: mol_type = other RNA
ttctttacttacccaaccat

SEQ ID NO: 23717 - RNA, 20 nt, synthetic construct
  source 1..20: mol_type = other RNA
tgtgtctcctcactagaatt

SEQ ID NO: 23718 - RNA, 20 nt, synthetic construct
  source 1..20: mol_type = other RNA
tactgtatactttataatta

SEQ ID NO: 23719 - RNA, 20 nt, synthetic construct
  source 1..20: mol_type = other RNA
ggctcactgcagcctcaatc

SEQ ID NO: 23720 - RNA, 20 nt, synthetic construct
  source 1..20: mol_type = other RNA
gcctgtaatcccagtacttt

SEQ ID NO: 23721 - RNA, 20 nt, synthetic construct
  source 1..20: mol_type = other RNA
gccggtaatcccagcacttt

SEQ ID NO: 23722 - RNA, 20 nt, synthetic construct
  source 1..20: mol_type = other RNA
gttgaactgggcgtggtggc

SEQ ID NO: 23723 - RNA, 20 nt, synthetic construct
  source 1..20: mol_type = other RNA
tactgtatccctgtgcctag

SEQ ID NO: 23724 - RNA, 20 nt, synthetic construct
  source 1..20: mol_type = other RNA
tatagtgctgaaaagtggcg

SEQ ID NO: 23725 - RNA, 20 nt, synthetic construct
  source 1..20: mol_type = other RNA
gggacaggtgggggcaggag

SEQ ID NO: 23726 - RNA, 20 nt, synthetic construct
  source 1..20: mol_type = other RNA
ccctgccctcccacttggcc

SEQ ID NO: 23727 - RNA, 20 nt, synthetic construct
  source 1..20: mol_type = other RNA
aggctgtgaatggcgctgtc

SEQ ID NO: 23728 - RNA, 20 nt, synthetic construct
  source 1..20: mol_type = other RNA
tcctagccgctgttttctta

SEQ ID NO: 23729 - RNA, 20 nt, synthetic construct
  source 1..20: mol_type = other RNA
tacctctgggaccacaccag

SEQ ID NO: 23730 - RNA, 20 nt, synthetic construct
  source 1..20: mol_type = other RNA
ccaactcagcattaccagct

SEQ ID NO: 23731 - RNA, 20 nt, synthetic construct
  source 1..20: mol_type = other RNA
tgcacccctgcactacaacc

SEQ ID NO: 23732 - RNA, 20 nt, synthetic construct
  source 1..20: mol_type = other RNA
gctgggaagaaattaacaag

SEQ ID NO: 23733 - RNA, 20 nt, synthetic construct
  source 1..20: mol_type = other RNA
acttgtatctctagttttta

SEQ ID NO: 23734 - RNA, 20 nt, synthetic construct
  source 1..20: mol_type = other RNA
aattgtgctaaaaactagag

SEQ ID NO: 23735 - RNA, 20 nt, synthetic construct
  source 1..20: mol_type = other RNA
gctgggaaggaaactaacaa

SEQ ID NO: 23736 - RNA, 20 nt, synthetic construct
  source 1..20: mol_type = other RNA
ctccccagaagtcctgtacc

SEQ ID NO: 23737 - RNA, 20 nt, synthetic construct
  source 1..20: mol_type = other RNA
tcactacacacagccacagt

SEQ ID NO: 23738 - RNA, 20 nt, synthetic construct
  source 1..20: mol_type = other RNA
gccactgcaccttagcctgg

SEQ ID NO: 23739 - RNA, 20 nt, synthetic construct
  source 1..20: mol_type = other RNA
gcctcagcctcccaagtagc

SEQ ID NO: 23740 - RNA, 20 nt, synthetic construct
  source 1..20: mol_type = other RNA
atttcatggaatctaagatg

SEQ ID NO: 23741 - RNA, 20 nt, synthetic construct
  source 1..20: mol_type = other RNA
attggggtcttacaatggat

SEQ ID NO: 23742 - RNA, 20 nt, synthetic construct
  source 1..20: mol_type = other RNA
ggaatctaagatgccatcca

SEQ ID NO: 23743 - RNA, 20 nt, synthetic construct
  source 1..20: mol_type = other RNA
tgagatcaggatgtgtctta

SEQ ID NO: 23744 - RNA, 20 nt, synthetic construct
  source 1..20: mol_type = other RNA
cgatgccaagacatatatgt

SEQ ID NO: 23745 - RNA, 20 nt, synthetic construct
  source 1..20: mol_type = other RNA
acccgcagcagcacctgacc

SEQ ID NO: 23746 - RNA, 20 nt, synthetic construct
  source 1..20: mol_type = other RNA
catgctattttcactgctac

SEQ ID NO: 23747 - RNA, 20 nt, synthetic construct
  source 1..20: mol_type = other RNA
gctattttcactgctactaa

SEQ ID NO: 23748 - RNA, 20 nt, synthetic construct
  source 1..20: mol_type = other RNA
gcgaccctcaccaatgttcc

SEQ ID NO: 23749 - RNA, 20 nt, synthetic construct
  source 1..20: mol_type = other RNA
tctaggcaccaaggcatgtt

SEQ ID NO: 23750 - RNA, 20 nt, synthetic construct
  source 1..20: mol_type = other RNA
tgtggggaggagtaaatgaa

SEQ ID NO: 23751 - RNA, 20 nt, synthetic construct
  source 1..20: mol_type = other RNA
ttactcctccccacaatgac

SEQ ID NO: 23752 - RNA, 20 nt, synthetic construct
  source 1..20: mol_type = other RNA
gcccattttacagatgggca

SEQ ID NO: 23753 - RNA, 20 nt, synthetic construct
  source 1..20: mol_type = other RNA
ttcttgccttactgtgtgga

SEQ ID NO: 23754 - RNA, 20 nt, synthetic construct
  source 1..20: mol_type = other RNA
tcctagcctctattttcata

SEQ ID NO: 23755 - RNA, 20 nt, synthetic construct
  source 1..20: mol_type = other RNA
atctagaaaatgggaaccat

SEQ ID NO: 23756 - RNA, 20 nt, synthetic construct
  source 1..20: mol_type = other RNA
gtggagacgctggcgtaagt

SEQ ID NO: 23757 - RNA, 20 nt, synthetic construct
  source 1..20: mol_type = other RNA
gctcttcccttcaccaatct

SEQ ID NO: 23758 - RNA, 20 nt, synthetic construct
  source 1..20: mol_type = other RNA
ctgtaaagtggggacagtaa

SEQ ID NO: 23759 - RNA, 20 nt, synthetic construct
  source 1..20: mol_type = other RNA
atggttcagcctaatatagc

SEQ ID NO: 23760 - RNA, 20 nt, synthetic construct
  source 1..20: mol_type = other RNA
ggtgacttaataaaagataa

SEQ ID NO: 23761 - RNA, 20 nt, synthetic construct
  source 1..20: mol_type = other RNA
atggttcaggtttatctttt

SEQ ID NO: 23762 - RNA, 20 nt, synthetic construct
  source 1..20: mol_type = other RNA
ctgtaaaatgggtcttgtaa

SEQ ID NO: 23763 - RNA, 20 nt, synthetic construct
  source 1..20: mol_type = other RNA
ggggaaaaggagaagcctag

SEQ ID NO: 23764 - RNA, 20 nt, synthetic construct
  source 1..20: mol_type = other RNA
ctcaggctgatccgtgaatc

SEQ ID NO: 23765 - RNA, 20 nt, synthetic construct
  source 1..20: mol_type = other RNA
cagagacatcccctcatctc

SEQ ID NO: 23766 - RNA, 20 nt, synthetic construct
  source 1..20: mol_type = other RNA
ctccaccctgggctcggtgg

SEQ ID NO: 23767 - RNA, 20 nt, synthetic construct
  source 1..20: mol_type = other RNA
ctgagacaaacccggagcat

SEQ ID NO: 23768 - RNA, 20 nt, synthetic construct
  source 1..20: mol_type = other RNA
agtgaggagcaggagacttg

SEQ ID NO: 23769 - RNA, 20 nt, synthetic construct
  source 1..20: mol_type = other RNA
gggatacagcctggagaaga

SEQ ID NO: 23770 - RNA, 20 nt, synthetic construct
  source 1..20: mol_type = other RNA
tccgcagccgggcaggggcc

SEQ ID NO: 23771 - RNA, 20 nt, synthetic construct
  source 1..20: mol_type = other RNA
gtctggctaatttttcattt

SEQ ID NO: 23772 - RNA, 20 nt, synthetic construct
  source 1..20: mol_type = other RNA
ttttagtagagacagggttt

SEQ ID NO: 23773 - RNA, 20 nt, synthetic construct
  source 1..20: mol_type = other RNA
ttcctgtgtcttttttcact

SEQ ID NO: 23774 - RNA, 20 nt, synthetic construct
  source 1..20: mol_type = other RNA
accctgttaccattttgggg

SEQ ID NO: 23775 - RNA, 20 nt, synthetic construct
  source 1..20: mol_type = other RNA
agtggcttaaaacaacactc

SEQ ID NO: 23776 - RNA, 20 nt, synthetic construct
  source 1..20: mol_type = other RNA
ttgagcagggctcagcgggg

SEQ ID NO: 23777 - RNA, 20 nt, synthetic construct
  source 1..20: mol_type = other RNA
tcttctgtacgtctgacagg

SEQ ID NO: 23778 - RNA, 20 nt, synthetic construct
  source 1..20: mol_type = other RNA
agtatggtggctgggttgga

SEQ ID NO: 23779 - RNA, 20 nt, synthetic construct
  source 1..20: mol_type = other RNA
aacctagccttagaagtcac

SEQ ID NO: 23780 - RNA, 20 nt, synthetic construct
  source 1..20: mol_type = other RNA
accactgcattccagactgg

SEQ ID NO: 23781 - RNA, 20 nt, synthetic construct
  source 1..20: mol_type = other RNA
ccccaaacaattaattttcc

SEQ ID NO: 23782 - RNA, 20 nt, synthetic construct
  source 1..20: mol_type = other RNA
ccactgtgccatgtgccagg

SEQ ID NO: 23783 - RNA, 20 nt, synthetic construct
  source 1..20: mol_type = other RNA
cacacagaccaaaagcagtg

SEQ ID NO: 23784 - RNA, 20 nt, synthetic construct
  source 1..20: mol_type = other RNA
catcacacagaccaaaagca

SEQ ID NO: 23785 - RNA, 20 nt, synthetic construct
  source 1..20: mol_type = other RNA
ttcatcatcacacagaccaa

SEQ ID NO: 23786 - RNA, 20 nt, synthetic construct
  source 1..20: mol_type = other RNA
taacaaatcgttagtgttaa

SEQ ID NO: 23787 - RNA, 20 nt, synthetic construct
  source 1..20: mol_type = other RNA
gccactgcactccagcgtgg

SEQ ID NO: 23788 - RNA, 20 nt, synthetic construct
  source 1..20: mol_type = other RNA
taaataaacagtagtggccg

SEQ ID NO: 23789 - RNA, 20 nt, synthetic construct
  source 1..20: mol_type = other RNA
cacttattgagctaatactt

SEQ ID NO: 23790 - RNA, 20 nt, synthetic construct
  source 1..20: mol_type = other RNA
ttgtaaaatgggcataacca

SEQ ID NO: 23791 - RNA, 20 nt, synthetic construct
  source 1..20: mol_type = other RNA
tattacatatatctgtgttt

SEQ ID NO: 23792 - RNA, 20 nt, synthetic construct
  source 1..20: mol_type = other RNA
tcttgcctctggctggaatg

SEQ ID NO: 23793 - RNA, 20 nt, synthetic construct
  source 1..20: mol_type = other RNA
ccttcgggacttgccccatt

SEQ ID NO: 23794 - RNA, 20 nt, synthetic construct
  source 1..20: mol_type = other RNA
gtcctaggacaagagcagac

SEQ ID NO: 23795 - RNA, 20 nt, synthetic construct
  source 1..20: mol_type = other RNA
tttatgttattgagcaccta

SEQ ID NO: 23796 - RNA, 20 nt, synthetic construct
  source 1..20: mol_type = other RNA
gactgtgctgtcagtatgta

SEQ ID NO: 23797 - RNA, 20 nt, synthetic construct
  source 1..20: mol_type = other RNA
tcattctgcaaatacatact

SEQ ID NO: 23798 - RNA, 20 nt, synthetic construct
  source 1..20: mol_type = other RNA
tctgcaaatacatactgaca

SEQ ID NO: 23799 - RNA, 20 nt, synthetic construct
  source 1..20: mol_type = other RNA
gaataagatgttcctgccct

SEQ ID NO: 23800 - RNA, 20 nt, synthetic construct
  source 1..20: mol_type = other RNA
cgtaagatgtggataaatta

SEQ ID NO: 23801 - RNA, 20 nt, synthetic construct
  source 1..20: mol_type = other RNA
gccctgattcctccgagcag

SEQ ID NO: 23802 - RNA, 20 nt, synthetic construct
  source 1..20: mol_type = other RNA
ttaatccctctcttgctctg

SEQ ID NO: 23803 - RNA, 20 nt, synthetic construct
  source 1..20: mol_type = other RNA
gccactgcattccagcctgg

SEQ ID NO: 23804 - RNA, 20 nt, synthetic construct
  source 1..20: mol_type = other RNA
gcctgtaatcccagcacttt

SEQ ID NO: 23805 - RNA, 20 nt, synthetic construct
  source 1..20: mol_type = other RNA
taaagataggggggaagggc

SEQ ID NO: 23806 - RNA, 20 nt, synthetic construct
  source 1..20: mol_type = other RNA
actttcagaaaagcatttcc

SEQ ID NO: 23807 - RNA, 20 nt, synthetic construct
  source 1..20: mol_type = other RNA
gctggtgagtgccacgttac

SEQ ID NO: 23808 - RNA, 20 nt, synthetic construct
  source 1..20: mol_type = other RNA
ttcaggttactcgttcttca

SEQ ID NO: 23809 - RNA, 20 nt, synthetic construct
  source 1..20: mol_type = other RNA
cccggagcgcacctgcttcc

SEQ ID NO: 23810 - RNA, 20 nt, synthetic construct
  source 1..20: mol_type = other RNA
ctgcctgcagtgtcaaatcg

SEQ ID NO: 23811 - RNA, 20 nt, synthetic construct
  source 1..20: mol_type = other RNA
taaaaagagttttatatttg

SEQ ID NO: 23812 - RNA, 20 nt, synthetic construct
  source 1..20: mol_type = other RNA
ctccatggcctggccccctg

SEQ ID NO: 23813 - RNA, 20 nt, synthetic construct
  source 1..20: mol_type = other RNA
ctcccagctcactatccttt

SEQ ID NO: 23814 - RNA, 20 nt, synthetic construct
  source 1..20: mol_type = other RNA
ttaataggataagaaattga

SEQ ID NO: 23815 - RNA, 20 nt, synthetic construct
  source 1..20: mol_type = other RNA
agctgtgcatctttaggcag

SEQ ID NO: 23816 - RNA, 20 nt, synthetic construct
  source 1..20: mol_type = other RNA
tcagaccgtttccatcgtta

SEQ ID NO: 23817 - RNA, 20 nt, synthetic construct
  source 1..20: mol_type = other RNA
ggcacttagcagggtcctca

SEQ ID NO: 23818 - RNA, 20 nt, synthetic construct
  source 1..20: mol_type = other RNA
ccttgagcccatctcagatt

SEQ ID NO: 23819 - RNA, 20 nt, synthetic construct
  source 1..20: mol_type = other RNA
gcttgtaatcccagcacttt

SEQ ID NO: 23820 - RNA, 20 nt, synthetic construct
  source 1..20: mol_type = other RNA
agttcactgcagccttgaac

SEQ ID NO: 23821 - RNA, 20 nt, synthetic construct
  source 1..20: mol_type = other RNA
tgtgtttatctgtagggtta

SEQ ID NO: 23822 - RNA, 20 nt, synthetic construct
  source 1..20: mol_type = other RNA
ttcgccatgttggccaggct

SEQ ID NO: 23823 - RNA, 20 nt, synthetic construct
  source 1..20: mol_type = other RNA
acaacactgtcagcagcttt

SEQ ID NO: 23824 - RNA, 20 nt, synthetic construct
  source 1..20: mol_type = other RNA
tctctgctatggactgagtg

SEQ ID NO: 23825 - RNA, 20 nt, synthetic construct
  source 1..20: mol_type = other RNA
ttgtcacacactttggctat

SEQ ID NO: 23826 - RNA, 20 nt, synthetic construct
  source 1..20: mol_type = other RNA
ttagcgtttgccaaggctgc

SEQ ID NO: 23827 - RNA, 20 nt, synthetic construct
  source 1..20: mol_type = other RNA
aacacaagtgttgtcacgat

SEQ ID NO: 23828 - RNA, 20 nt, synthetic construct
  source 1..20: mol_type = other RNA
gtcttaactcacttatccct

SEQ ID NO: 23829 - RNA, 20 nt, synthetic construct
  source 1..20: mol_type = other RNA
ccctgcatttcacatggagc

SEQ ID NO: 23830 - RNA, 20 nt, synthetic construct
  source 1..20: mol_type = other RNA
aaatggcagagccaggattt

SEQ ID NO: 23831 - RNA, 20 nt, synthetic construct
  source 1..20: mol_type = other RNA
tagtatattttatatgtggc

SEQ ID NO: 23832 - RNA, 20 nt, synthetic construct
  source 1..20: mol_type = other RNA
gagctatcattagtatattt

SEQ ID NO: 23833 - RNA, 20 nt, synthetic construct
  source 1..20: mol_type = other RNA
gagctaaaaaataaaacaaa

SEQ ID NO: 23834 - RNA, 20 nt, synthetic construct
  source 1..20: mol_type = other RNA
gccactgccctccagcctgg

SEQ ID NO: 23835 - RNA, 20 nt, synthetic construct
  source 1..20: mol_type = other RNA
gcctcagcctcctgagtagc

SEQ ID NO: 23836 - RNA, 20 nt, synthetic construct
  source 1..20: mol_type = other RNA
aaactttcttaaaacgttat

SEQ ID NO: 23837 - RNA, 20 nt, synthetic construct
  source 1..20: mol_type = other RNA
aacgttttaagaaagtttat

SEQ ID NO: 23838 - RNA, 20 nt, synthetic construct
  source 1..20: mol_type = other RNA
cagagcacagcagacaagtt

SEQ ID NO: 23839 - RNA, 20 nt, synthetic construct
  source 1..20: mol_type = other RNA
tccagccattccccagagct

SEQ ID NO: 23840 - RNA, 20 nt, synthetic construct
  source 1..20: mol_type = other RNA
tctgactacagaaaccagcc

SEQ ID NO: 23841 - RNA, 20 nt, synthetic construct
  source 1..20: mol_type = other RNA
ctggaaaaggggacagtgcc

SEQ ID NO: 23842 - RNA, 20 nt, synthetic construct
  source 1..20: mol_type = other RNA
tcctttctccatgtaccaaa

SEQ ID NO: 23843 - RNA, 20 nt, synthetic construct
  source 1..20: mol_type = other RNA
tctgagataaggtagagacc

SEQ ID NO: 23844 - RNA, 20 nt, synthetic construct
  source 1..20: mol_type = other RNA
ttctctgtgacgttggcttt

SEQ ID NO: 23845 - RNA, 20 nt, synthetic construct
  source 1..20: mol_type = other RNA
catttctctgtgacgttggc

SEQ ID NO: 23846 - RNA, 20 nt, synthetic construct
  source 1..20: mol_type = other RNA
ttatgtcaccatataacacc

SEQ ID NO: 23847 - RNA, 20 nt, synthetic construct
  source 1..20: mol_type = other RNA
tgtatttttagcattgcctt

SEQ ID NO: 23848 - RNA, 20 nt, synthetic construct
  source 1..20: mol_type = other RNA
acacagaaggcaatgctaaa

SEQ ID NO: 23849 - RNA, 20 nt, synthetic construct
  source 1..20: mol_type = other RNA
ctcagatacccatctatgag

SEQ ID NO: 23850 - RNA, 20 nt, synthetic construct
  source 1..20: mol_type = other RNA
agatgggtatctgagatgag

SEQ ID NO: 23851 - RNA, 20 nt, synthetic construct
  source 1..20: mol_type = other RNA
cgaacttctgcaagcctcag

SEQ ID NO: 23852 - RNA, 20 nt, synthetic construct
  source 1..20: mol_type = other RNA
ttctgggagtccctcctggc

SEQ ID NO: 23853 - RNA, 20 nt, synthetic construct
  source 1..20: mol_type = other RNA
tcattaagcaagcaccaact

SEQ ID NO: 23854 - RNA, 20 nt, synthetic construct
  source 1..20: mol_type = other RNA
taagcaagcaccaactatac

SEQ ID NO: 23855 - RNA, 20 nt, synthetic construct
  source 1..20: mol_type = other RNA
tcactatcccaatctaattt

SEQ ID NO: 23856 - RNA, 20 nt, synthetic construct
  source 1..20: mol_type = other RNA
ctcctaagcctcggtttcct

SEQ ID NO: 23857 - RNA, 20 nt, synthetic construct
  source 1..20: mol_type = other RNA
aaggattgaccaaaaactga

SEQ ID NO: 23858 - RNA, 20 nt, synthetic construct
  source 1..20: mol_type = other RNA
taacttttggccaaatacca

SEQ ID NO: 23859 - RNA, 20 nt, synthetic construct
  source 1..20: mol_type = other RNA
cgcttggcatggataaaaac

SEQ ID NO: 23860 - RNA, 20 nt, synthetic construct
  source 1..20: mol_type = other RNA
catcgcttggcatggataaa

SEQ ID NO: 23861 - RNA, 20 nt, synthetic construct
  source 1..20: mol_type = other RNA
ctgtaaaactacttttttat

SEQ ID NO: 23862 - RNA, 20 nt, synthetic construct
  source 1..20: mol_type = other RNA
cttaaactgcaaattataaa

SEQ ID NO: 23863 - RNA, 20 nt, synthetic construct
  source 1..20: mol_type = other RNA
ctgaatctaatctcgagtat

SEQ ID NO: 23864 - RNA, 20 nt, synthetic construct
  source 1..20: mol_type = other RNA
ctacaactttattcaaattt

SEQ ID NO: 23865 - RNA, 20 nt, synthetic construct
  source 1..20: mol_type = other RNA
aggattgtatagtgtatcaa

SEQ ID NO: 23866 - RNA, 20 nt, synthetic construct
  source 1..20: mol_type = other RNA
tatgcacctttactcctaaa

SEQ ID NO: 23867 - RNA, 20 nt, synthetic construct
  source 1..20: mol_type = other RNA
aagcatttgaaaatgggttc

SEQ ID NO: 23868 - RNA, 20 nt, synthetic construct
  source 1..20: mol_type = other RNA
gtacacgtgcatgctcttcc

SEQ ID NO: 23869 - RNA, 20 nt, synthetic construct
  source 1..20: mol_type = other RNA
aacagaggtttttgtttgtt

SEQ ID NO: 23870 - RNA, 20 nt, synthetic construct
  source 1..20: mol_type = other RNA
acgcactcttccaacttttt

SEQ ID NO: 23871 - RNA, 20 nt, synthetic construct
  source 1..20: mol_type = other RNA
agtttctgccaggcctattt

SEQ ID NO: 23872 - RNA, 20 nt, synthetic construct
  source 1..20: mol_type = other RNA
atttctggtttatctgctag

SEQ ID NO: 23873 - RNA, 20 nt, synthetic construct
  source 1..20: mol_type = other RNA
gtgtctgttttgccgaacta

SEQ ID NO: 23874 - RNA, 20 nt, synthetic construct
  source 1..20: mol_type = other RNA
gtcaggagcagagctggaga

SEQ ID NO: 23875 - RNA, 20 nt, synthetic construct
  source 1..20: mol_type = other RNA
ctaagcaagagacagacaat

SEQ ID NO: 23876 - RNA, 20 nt, synthetic construct
  source 1..20: mol_type = other RNA
taggaaccgggacgaataat

SEQ ID NO: 23877 - RNA, 20 nt, synthetic construct
  source 1..20: mol_type = other RNA
gcatgaatatttatatcctg

SEQ ID NO: 23878 - RNA, 20 nt, synthetic construct
  source 1..20: mol_type = other RNA
gcatgagtataggtgcaggt

SEQ ID NO: 23879 - RNA, 20 nt, synthetic construct
  source 1..20: mol_type = other RNA
agtcggatacaatggaaagc

SEQ ID NO: 23880 - RNA, 20 nt, synthetic construct
  source 1..20: mol_type = other RNA
attcatagtcggatacaatg

SEQ ID NO: 23881 - RNA, 20 nt, synthetic construct
  source 1..20: mol_type = other RNA
tatttccatcttctagaaga

SEQ ID NO: 23882 - RNA, 20 nt, synthetic construct
  source 1..20: mol_type = other RNA
ggttaagagccagggccctg

SEQ ID NO: 23883 - RNA, 20 nt, synthetic construct
  source 1..20: mol_type = other RNA
cttgagattcatcctgggcc

SEQ ID NO: 23884 - RNA, 20 nt, synthetic construct
  source 1..20: mol_type = other RNA
cctgggccccactgtgtgac

SEQ ID NO: 23885 - RNA, 20 nt, synthetic construct
  source 1..20: mol_type = other RNA
gtggtcacatgtgttcccca

SEQ ID NO: 23886 - RNA, 20 nt, synthetic construct
  source 1..20: mol_type = other RNA
ctccaggcccctttccataa

SEQ ID NO: 23887 - RNA, 20 nt, synthetic construct
  source 1..20: mol_type = other RNA
cttgaggtctttcctggcgg

SEQ ID NO: 23888 - RNA, 20 nt, synthetic construct
  source 1..20: mol_type = other RNA
accctggggttctgagcttc

SEQ ID NO: 23889 - RNA, 20 nt, synthetic construct
  source 1..20: mol_type = other RNA
ttggaaggggaagtgtttct

SEQ ID NO: 23890 - RNA, 20 nt, synthetic construct
  source 1..20: mol_type = other RNA
tcaacagactttgaccctgc

SEQ ID NO: 23891 - RNA, 20 nt, synthetic construct
  source 1..20: mol_type = other RNA
gtttctctatcttcactaaa

SEQ ID NO: 23892 - RNA, 20 nt, synthetic construct
  source 1..20: mol_type = other RNA
ccaagcctctgtcacctctg

SEQ ID NO: 23893 - RNA, 20 nt, synthetic construct
  source 1..20: mol_type = other RNA
tctgtccacaattgccagag

SEQ ID NO: 23894 - RNA, 20 nt, synthetic construct
  source 1..20: mol_type = other RNA
ttttgcaaaatgggaatggg

SEQ ID NO: 23895 - RNA, 20 nt, synthetic construct
  source 1..20: mol_type = other RNA
ctcctgcctagaaccttcca

SEQ ID NO: 23896 - RNA, 20 nt, synthetic construct
  source 1..20: mol_type = other RNA
ctccttagagaggctttctc

SEQ ID NO: 23897 - RNA, 20 nt, synthetic construct
  source 1..20: mol_type = other RNA
gtccttcttgcctgccttca

SEQ ID NO: 23898 - RNA, 20 nt, synthetic construct
  source 1..20: mol_type = other RNA
agttccgaaaaaatctgatt

SEQ ID NO: 23899 - RNA, 20 nt, synthetic construct
  source 1..20: mol_type = other RNA
tctgtaaaagaacggacgga

SEQ ID NO: 23900 - RNA, 20 nt, synthetic construct
  source 1..20: mol_type = other RNA
ttgggatcagagtttcaaca

SEQ ID NO: 23901 - RNA, 20 nt, synthetic construct
  source 1..20: mol_type = other RNA
atgttgaaactctgatccca

SEQ ID NO: 23902 - RNA, 20 nt, synthetic construct
  source 1..20: mol_type = other RNA
gggtgggattaatgccctta

SEQ ID NO: 23903 - RNA, 20 nt, synthetic construct
  source 1..20: mol_type = other RNA
tgccacttagaccctgtgcc

SEQ ID NO: 23904 - RNA, 20 nt, synthetic construct
  source 1..20: mol_type = other RNA
agtcacaaggaagagaggca

SEQ ID NO: 23905 - RNA, 20 nt, synthetic construct
  source 1..20: mol_type = other RNA
ttccctacctctcacataca

SEQ ID NO: 23906 - RNA, 20 nt, synthetic construct
  source 1..20: mol_type = other RNA
tgcactgagatggtcaagtc

SEQ ID NO: 23907 - RNA, 20 nt, synthetic construct
  source 1..20: mol_type = other RNA
cagttctgcagctcagaact

SEQ ID NO: 23908 - RNA, 20 nt, synthetic construct
  source 1..20: mol_type = other RNA
cctgttcagagagggcactt

SEQ ID NO: 23909 - RNA, 20 nt, synthetic construct
  source 1..20: mol_type = other RNA
gccgccgcagctggttgggg

SEQ ID NO: 23910 - RNA, 20 nt, synthetic construct
  source 1..20: mol_type = other RNA
ggagtacatcgtcctcaacg

SEQ ID NO: 23911 - RNA, 20 nt, synthetic construct
  source 1..20: mol_type = other RNA
tggcaggccgccccctgcac

SEQ ID NO: 23912 - RNA, 20 nt, synthetic construct
  source 1..20: mol_type = other RNA
ggtggagatccaccagtgtc

SEQ ID NO: 23913 - RNA, 20 nt, synthetic construct
  source 1..20: mol_type = other RNA
aattaaatgacgcaaagcac

SEQ ID NO: 23914 - RNA, 20 nt, synthetic construct
  source 1..20: mol_type = other RNA
tctcgattgctgccatttat

SEQ ID NO: 23915 - RNA, 20 nt, synthetic construct
  source 1..20: mol_type = other RNA
aaccgaaagtaagaggcaca

SEQ ID NO: 23916 - RNA, 20 nt, synthetic construct
  source 1..20: mol_type = other RNA
attaaatgcaattttctcat

SEQ ID NO: 23917 - RNA, 20 nt, synthetic construct
  source 1..20: mol_type = other RNA
aataagatttttttttaaat

SEQ ID NO: 23918 - RNA, 20 nt, synthetic construct
  source 1..20: mol_type = other RNA
acccagcctgtctgatactt

SEQ ID NO: 23919 - RNA, 20 nt, synthetic construct
  source 1..20: mol_type = other RNA
tgaaaaatatagagtttata

SEQ ID NO: 23920 - RNA, 20 nt, synthetic construct
  source 1..20: mol_type = other RNA
gtgatcagcctgccttggcc

SEQ ID NO: 23921 - RNA, 20 nt, synthetic construct
  source 1..20: mol_type = other RNA
gaccagcctggccaacatgg

SEQ ID NO: 23922 - RNA, 20 nt, synthetic construct
  source 1..20: mol_type = other RNA
gtgattcctgggactacagg

SEQ ID NO: 23923 - RNA, 20 nt, synthetic construct
  source 1..20: mol_type = other RNA
agttcatttctcagttcata

SEQ ID NO: 23924 - RNA, 20 nt, synthetic construct
  source 1..20: mol_type = other RNA
aatggaggtggcttgttggg

SEQ ID NO: 23925 - RNA, 20 nt, synthetic construct
  source 1..20: mol_type = other RNA
tgtcggatggatgaaaccca

SEQ ID NO: 23926 - RNA, 20 nt, synthetic construct
  source 1..20: mol_type = other RNA
ttctctctccattcttcagt

SEQ ID NO: 23927 - RNA, 20 nt, synthetic construct
  source 1..20: mol_type = other RNA
tgaaattctactgcccaggg

SEQ ID NO: 23928 - RNA, 20 nt, synthetic construct
  source 1..20: mol_type = other RNA
atctcctgttatattctaga

SEQ ID NO: 23929 - RNA, 20 nt, synthetic construct
  source 1..20: mol_type = other RNA
acctgaaaagaaaagaaaaa

SEQ ID NO: 23930 - RNA, 20 nt, synthetic construct
  source 1..20: mol_type = other RNA
atctgaccaagatgttgatg

SEQ ID NO: 23931 - RNA, 20 nt, synthetic construct
  source 1..20: mol_type = other RNA
tctcttgcactcaaagcttg

SEQ ID NO: 23932 - RNA, 20 nt, synthetic construct
  source 1..20: mol_type = other RNA
acagggaaacagtcttcaag

SEQ ID NO: 23933 - RNA, 20 nt, synthetic construct
  source 1..20: mol_type = other RNA
gttccacttggtaaaaaatg

SEQ ID NO: 23934 - RNA, 20 nt, synthetic construct
  source 1..20: mol_type = other RNA
agtacagcgggccttccgta

SEQ ID NO: 23935 - RNA, 20 nt, synthetic construct
  source 1..20: mol_type = other RNA
aggggtctgctgtctagtgg

SEQ ID NO: 23936 - RNA, 20 nt, synthetic construct
  source 1..20: mol_type = other RNA
gcaattctcctgcctcagcc

SEQ ID NO: 23937 - RNA, 20 nt, synthetic construct
  source 1..20: mol_type = other RNA
atccagtcttcaccgcttcc

SEQ ID NO: 23938 - RNA, 20 nt, synthetic construct
  source 1..20: mol_type = other RNA
cttagccttcagggcatcaa

SEQ ID NO: 23939 - RNA, 20 nt, synthetic construct
  source 1..20: mol_type = other RNA
gaccagcctggccaacttgg

SEQ ID NO: 23940 - RNA, 20 nt, synthetic construct
  source 1..20: mol_type = other RNA
caaatatatattgcatacct

SEQ ID NO: 23941 - RNA, 20 nt, synthetic construct
  source 1..20: mol_type = other RNA
actgaaaccagcctgatgat

SEQ ID NO: 23942 - RNA, 20 nt, synthetic construct
  source 1..20: mol_type = other RNA
ctcgagggcaggggccacat

SEQ ID NO: 23943 - RNA, 20 nt, synthetic construct
  source 1..20: mol_type = other RNA
gcaattctcctgcctcagcc

SEQ ID NO: 23944 - RNA, 20 nt, synthetic construct
  source 1..20: mol_type = other RNA
atctaaaactccattcattc

SEQ ID NO: 23945 - RNA, 20 nt, synthetic construct
  source 1..20: mol_type = other RNA
atggtcttagaatagtgtat

SEQ ID NO: 23946 - RNA, 20 nt, synthetic construct
  source 1..20: mol_type = other RNA
atgctcagtcttgtgtaggt

SEQ ID NO: 23947 - RNA, 20 nt, synthetic construct
  source 1..20: mol_type = other RNA
gttcataagcatcatctctg

SEQ ID NO: 23948 - RNA, 20 nt, synthetic construct
  source 1..20: mol_type = other RNA
aaaatcaaaaacaaaaacaa

SEQ ID NO: 23949 - RNA, 20 nt, synthetic construct
  source 1..20: mol_type = other RNA
gcaattctcctgcctcagcc

SEQ ID NO: 23950 - RNA, 20 nt, synthetic construct
  source 1..20: mol_type = other RNA
cagagaggaagcctggggtg

SEQ ID NO: 23951 - RNA, 20 nt, synthetic construct
  source 1..20: mol_type = other RNA
ctcctgacctcaaatgatct

SEQ ID NO: 23952 - RNA, 20 nt, synthetic construct
  source 1..20: mol_type = other RNA
attgactcagcatttcttat

SEQ ID NO: 23953 - RNA, 20 nt, synthetic construct
  source 1..20: mol_type = other RNA
agtaatcaccttacaaagaa

SEQ ID NO: 23954 - RNA, 20 nt, synthetic construct
  source 1..20: mol_type = other RNA
ctgattctcctgcctcagcc

SEQ ID NO: 23955 - RNA, 20 nt, synthetic construct
  source 1..20: mol_type = other RNA
gcaatcctcctgcttcggcc

SEQ ID NO: 23956 - RNA, 20 nt, synthetic construct
  source 1..20: mol_type = other RNA
ataaaactttacgtcccatt

SEQ ID NO: 23957 - RNA, 20 nt, synthetic construct
  source 1..20: mol_type = other RNA
cagtctgacgttcagaaatg

SEQ ID NO: 23958 - RNA, 20 nt, synthetic construct
  source 1..20: mol_type = other RNA
agcaaaccatacatttcagg

SEQ ID NO: 23959 - RNA, 20 nt, synthetic construct
  source 1..20: mol_type = other RNA
cgagagttgaggacttatcc

SEQ ID NO: 23960 - RNA, 20 nt, synthetic construct
  source 1..20: mol_type = other RNA
ggcatggctccctccccagc

SEQ ID NO: 23961 - RNA, 20 nt, synthetic construct
  source 1..20: mol_type = other RNA
atcctgcgtctgcaaactgc

SEQ ID NO: 23962 - RNA, 20 nt, synthetic construct
  source 1..20: mol_type = other RNA
gaccagcctgggcaacctgg

SEQ ID NO: 23963 - RNA, 20 nt, synthetic construct
  source 1..20: mol_type = other RNA
gtgattctcgtgcctcagcc

SEQ ID NO: 23964 - RNA, 20 nt, synthetic construct
  source 1..20: mol_type = other RNA
tccttctgacatcaaggaca

SEQ ID NO: 23965 - RNA, 20 nt, synthetic construct
  source 1..20: mol_type = other RNA
ccacaagtgatactgttggt

SEQ ID NO: 23966 - RNA, 20 nt, synthetic construct
  source 1..20: mol_type = other RNA
atgtacatttcagtggcatt

SEQ ID NO: 23967 - RNA, 20 nt, synthetic construct
  source 1..20: mol_type = other RNA
actgttgtgcaacctccgct

SEQ ID NO: 23968 - RNA, 20 nt, synthetic construct
  source 1..20: mol_type = other RNA
ctctagaaagctttctttta

SEQ ID NO: 23969 - RNA, 20 nt, synthetic construct
  source 1..20: mol_type = other RNA
gaccagcctgggcaacagag

SEQ ID NO: 23970 - RNA, 20 nt, synthetic construct
  source 1..20: mol_type = other RNA
aaatttatttttattaattt

SEQ ID NO: 23971 - RNA, 20 nt, synthetic construct
  source 1..20: mol_type = other RNA
acccaaagggcagggagctg

SEQ ID NO: 23972 - RNA, 20 nt, synthetic construct
  source 1..20: mol_type = other RNA
cggtgctggaattgggatgg

SEQ ID NO: 23973 - RNA, 20 nt, synthetic construct
  source 1..20: mol_type = other RNA
ttatgtcctgtcctgcaatg

SEQ ID NO: 23974 - RNA, 20 nt, synthetic construct
  source 1..20: mol_type = other RNA
cttttgattttgcagccaag

SEQ ID NO: 23975 - RNA, 20 nt, synthetic construct
  source 1..20: mol_type = other RNA
cccctgggcctttaaacctt

SEQ ID NO: 23976 - RNA, 20 nt, synthetic construct
  source 1..20: mol_type = other RNA
atcttagttccacacttgct

SEQ ID NO: 23977 - RNA, 20 nt, synthetic construct
  source 1..20: mol_type = other RNA
ttgagtctttttgagattct

SEQ ID NO: 23978 - RNA, 20 nt, synthetic construct
  source 1..20: mol_type = other RNA
cgagtgttggagccccttca

SEQ ID NO: 23979 - RNA, 20 nt, synthetic construct
  source 1..20: mol_type = other RNA
gcaattttcctgcctcagcc

SEQ ID NO: 23980 - RNA, 20 nt, synthetic construct
  source 1..20: mol_type = other RNA
gaccagcctgaccagcatgg

SEQ ID NO: 23981 - RNA, 20 nt, synthetic construct
  source 1..20: mol_type = other RNA
ctgttaacggcaactctggg

SEQ ID NO: 23982 - RNA, 20 nt, synthetic construct
  source 1..20: mol_type = other RNA
atcctgcatgcagtgtgaag

SEQ ID NO: 23983 - RNA, 20 nt, synthetic construct
  source 1..20: mol_type = other RNA
agaggaccttctaaaaatac

SEQ ID NO: 23984 - RNA, 20 nt, synthetic construct
  source 1..20: mol_type = other RNA
aaaggctatagagtgggctg

SEQ ID NO: 23985 - RNA, 20 nt, synthetic construct
  source 1..20: mol_type = other RNA
atctcagcccactaatccct

SEQ ID NO: 23986 - RNA, 20 nt, synthetic construct
  source 1..20: mol_type = other RNA
aggccccttcattggactgt

SEQ ID NO: 23987 - RNA, 20 nt, synthetic construct
  source 1..20: mol_type = other RNA
gtagatcttggtgtgactgg

SEQ ID NO: 23988 - RNA, 20 nt, synthetic construct
  source 1..20: mol_type = other RNA
gcgattctcctgcctcagcc

SEQ ID NO: 23989 - RNA, 20 nt, synthetic construct
  source 1..20: mol_type = other RNA
actctggatgacactgctgt

SEQ ID NO: 23990 - RNA, 20 nt, synthetic construct
  source 1..20: mol_type = other RNA
gcttgacctctttccttcac

SEQ ID NO: 23991 - RNA, 20 nt, synthetic construct
  source 1..20: mol_type = other RNA
cctcccaagtagctggcatt

SEQ ID NO: 23992 - RNA, 20 nt, synthetic construct
  source 1..20: mol_type = other RNA
gcaattctcctgcttcaacc

SEQ ID NO: 23993 - RNA, 20 nt, synthetic construct
  source 1..20: mol_type = other RNA
tgtattctcttctgggccca

SEQ ID NO: 23994 - RNA, 20 nt, synthetic construct
  source 1..20: mol_type = other RNA
cccaccacacatgacatgca

SEQ ID NO: 23995 - RNA, 20 nt, synthetic construct
  source 1..20: mol_type = other RNA
gaccagcgtggccaacatgg

SEQ ID NO: 23996 - RNA, 20 nt, synthetic construct
  source 1..20: mol_type = other RNA
gcgattctcctgccccagtc

SEQ ID NO: 23997 - RNA, 20 nt, synthetic construct
  source 1..20: mol_type = other RNA
gatctttaattctttttttg

SEQ ID NO: 23998 - RNA, 20 nt, synthetic construct
  source 1..20: mol_type = other RNA
cttctggcctccagaaccat

SEQ ID NO: 23999 - RNA, 20 nt, synthetic construct
  source 1..20: mol_type = other RNA
gccattcttctgcctcagcc

SEQ ID NO: 24000 - RNA, 20 nt, synthetic construct
  source 1..20: mol_type = other RNA
gaccagcctgggcaacatag

SEQ ID NO: 24001 - RNA, 20 nt, synthetic construct
  source 1..20: mol_type = other RNA
ataaatagaatcatacaata

SEQ ID NO: 24002 - RNA, 20 nt, synthetic construct
  source 1..20: mol_type = other RNA
aatagccaaaatataaaaac

SEQ ID NO: 24003 - RNA, 20 nt, synthetic construct
  source 1..20: mol_type = other RNA
caaatgatgaggaaatctta

SEQ ID NO: 24004 - RNA, 20 nt, synthetic construct
  source 1..20: mol_type = other RNA
atcctggttccacttggaca

SEQ ID NO: 24005 - RNA, 20 nt, synthetic construct
  source 1..20: mol_type = other RNA
agtctccatttttaaccaca

SEQ ID NO: 24006 - RNA, 20 nt, synthetic construct
  source 1..20: mol_type = other RNA
cataggctctgtatgaggtg

SEQ ID NO: 24007 - RNA, 20 nt, synthetic construct
  source 1..20: mol_type = other RNA
tacactgtgctctggggaaa

SEQ ID NO: 24008 - RNA, 20 nt, synthetic construct
  source 1..20: mol_type = other RNA
ggcctggttccaggatccct

SEQ ID NO: 24009 - RNA, 20 nt, synthetic construct
  source 1..20: mol_type = other RNA
attccacctctactttccac

SEQ ID NO: 24010 - RNA, 20 nt, synthetic construct
  source 1..20: mol_type = other RNA
caaacatttcttgagtcccc

SEQ ID NO: 24011 - RNA, 20 nt, synthetic construct
  source 1..20: mol_type = other RNA
gcctcggggcctttgcagtt

SEQ ID NO: 24012 - RNA, 20 nt, synthetic construct
  source 1..20: mol_type = other RNA
aggagtcagccatgggaaga

SEQ ID NO: 24013 - RNA, 20 nt, synthetic construct
  source 1..20: mol_type = other RNA
cagatatctactgaggtgct

SEQ ID NO: 24014 - RNA, 20 nt, synthetic construct
  source 1..20: mol_type = other RNA
gcgattctcctgcctcagcc

SEQ ID NO: 24015 - RNA, 20 nt, synthetic construct
  source 1..20: mol_type = other RNA
gcgattctcccaccctagcc

SEQ ID NO: 24016 - RNA, 20 nt, synthetic construct
  source 1..20: mol_type = other RNA
aaaaaaaaaaaaatgttttc

SEQ ID NO: 24017 - RNA, 20 nt, synthetic construct
  source 1..20: mol_type = other RNA
gatacaataaaagtgaaaga

SEQ ID NO: 24018 - RNA, 20 nt, synthetic construct
  source 1..20: mol_type = other RNA
tgtacatttcaaatgtaaat

SEQ ID NO: 24019 - RNA, 20 nt, synthetic construct
  source 1..20: mol_type = other RNA
atgtaaattgcagatttaca

SEQ ID NO: 24020 - RNA, 20 nt, synthetic construct
  source 1..20: mol_type = other RNA
gccaaggagctggggttgga

SEQ ID NO: 24021 - RNA, 20 nt, synthetic construct
  source 1..20: mol_type = other RNA
ggctgggtagtggtcttggg

SEQ ID NO: 24022 - RNA, 20 nt, synthetic construct
  source 1..20: mol_type = other RNA
tctcttccatcccctcccca

SEQ ID NO: 24023 - RNA, 20 nt, synthetic construct
  source 1..20: mol_type = other RNA
ccaggagccagcctccggcc

SEQ ID NO: 24024 - RNA, 20 nt, synthetic construct
  source 1..20: mol_type = other RNA
aagatctgaccacattgtct

SEQ ID NO: 24025 - RNA, 20 nt, synthetic construct
  source 1..20: mol_type = other RNA
cttcaaaagatctgaccaca

SEQ ID NO: 24026 - RNA, 20 nt, synthetic construct
  source 1..20: mol_type = other RNA
gtgattctcctgcctcagcc

SEQ ID NO: 24027 - RNA, 20 nt, synthetic construct
  source 1..20: mol_type = other RNA
ccccttctttgttggctcac

SEQ ID NO: 24028 - RNA, 20 nt, synthetic construct
  source 1..20: mol_type = other RNA
taagcctgcactgggtgtta

SEQ ID NO: 24029 - RNA, 20 nt, synthetic construct
  source 1..20: mol_type = other RNA
atcccggttctaccacttgc

SEQ ID NO: 24030 - RNA, 20 nt, synthetic construct
  source 1..20: mol_type = other RNA
cctcacaggctcaagcaatc

SEQ ID NO: 24031 - RNA, 20 nt, synthetic construct
  source 1..20: mol_type = other RNA
gcaatggcaggggacagaga

SEQ ID NO: 24032 - RNA, 20 nt, synthetic construct
  source 1..20: mol_type = other RNA
gatgtggctgaaaacctcat

SEQ ID NO: 24033 - RNA, 20 nt, synthetic construct
  source 1..20: mol_type = other RNA
atattgactgggagaatgcc

SEQ ID NO: 24034 - RNA, 20 nt, synthetic construct
  source 1..20: mol_type = other RNA
gttctgagaagattggtctg

SEQ ID NO: 24035 - RNA, 20 nt, synthetic construct
  source 1..20: mol_type = other RNA
agccaagtccctgaaggatg

SEQ ID NO: 24036 - RNA, 20 nt, synthetic construct
  source 1..20: mol_type = other RNA
ttctagaggctccgcctggg

SEQ ID NO: 24037 - RNA, 20 nt, synthetic construct
  source 1..20: mol_type = other RNA
aacctgccatcatgtgccca

SEQ ID NO: 24038 - RNA, 20 nt, synthetic construct
  source 1..20: mol_type = other RNA
gaccagcctgggcaacatag

SEQ ID NO: 24039 - RNA, 20 nt, synthetic construct
  source 1..20: mol_type = other RNA
atctgagaacctccagcatt

SEQ ID NO: 24040 - RNA, 20 nt, synthetic construct
  source 1..20: mol_type = other RNA
gtgctcaatacctctgttga

SEQ ID NO: 24041 - RNA, 20 nt, synthetic construct
  source 1..20: mol_type = other RNA
cagaggtattgagcacttga

SEQ ID NO: 24042 - RNA, 20 nt, synthetic construct
  source 1..20: mol_type = other RNA
aatgggggaaagattctccc

SEQ ID NO: 24043 - RNA, 20 nt, synthetic construct
  source 1..20: mol_type = other RNA
accaggatagtcccaggcaa

SEQ ID NO: 24044 - RNA, 20 nt, synthetic construct
  source 1..20: mol_type = other RNA
gcaattttcctgcctcagcc

SEQ ID NO: 24045 - RNA, 20 nt, synthetic construct
  source 1..20: mol_type = other RNA
gaccagcctggccaacatgg

SEQ ID NO: 24046 - RNA, 20 nt, synthetic construct
  source 1..20: mol_type = other RNA
aacaagagacactggctttt

SEQ ID NO: 24047 - RNA, 20 nt, synthetic construct
  source 1..20: mol_type = other RNA
gatcggaactgcgctctggg

SEQ ID NO: 24048 - RNA, 20 nt, synthetic construct
  source 1..20: mol_type = other RNA
cctcctaggcatgcttctgc

SEQ ID NO: 24049 - RNA, 20 nt, synthetic construct
  source 1..20: mol_type = other RNA
atgattctcctgcctcagcc

SEQ ID NO: 24050 - RNA, 20 nt, synthetic construct
  source 1..20: mol_type = other RNA
acaaacaaataacaacaaaa

SEQ ID NO: 24051 - RNA, 20 nt, synthetic construct
  source 1..20: mol_type = other RNA
tattagaatgatcattcttt

SEQ ID NO: 24052 - RNA, 20 nt, synthetic construct
  source 1..20: mol_type = other RNA
aggacataattgcagaataa

SEQ ID NO: 24053 - RNA, 20 nt, synthetic construct
  source 1..20: mol_type = other RNA
ggggatgagaaaaataagga

SEQ ID NO: 24054 - RNA, 20 nt, synthetic construct
  source 1..20: mol_type = other RNA
gaccagcttgggcaacatag

SEQ ID NO: 24055 - RNA, 20 nt, synthetic construct
  source 1..20: mol_type = other RNA
aggtcacgaaaggatctaca

SEQ ID NO: 24056 - RNA, 20 nt, synthetic construct
  source 1..20: mol_type = other RNA
gtccatcatgagttagactt

SEQ ID NO: 24057 - RNA, 20 nt, synthetic construct
  source 1..20: mol_type = other RNA
aattaatttaaatttgtttt

SEQ ID NO: 24058 - RNA, 20 nt, synthetic construct
  source 1..20: mol_type = other RNA
ggctgcagaggtatgatcat

SEQ ID NO: 24059 - RNA, 20 nt, synthetic construct
  source 1..20: mol_type = other RNA
tcagccattcatccttccat

SEQ ID NO: 24060 - RNA, 20 nt, synthetic construct
  source 1..20: mol_type = other RNA
tgattcatccattcacttat

SEQ ID NO: 24061 - RNA, 20 nt, synthetic construct
  source 1..20: mol_type = other RNA
gaccagcctgggcaacgtgg

SEQ ID NO: 24062 - RNA, 20 nt, synthetic construct
  source 1..20: mol_type = other RNA
tgggattttttttttttttt

SEQ ID NO: 24063 - RNA, 20 nt, synthetic construct
  source 1..20: mol_type = other RNA
gcaattctcacacctcagcc

SEQ ID NO: 24064 - RNA, 20 nt, synthetic construct
  source 1..20: mol_type = other RNA
gaccagcctggccaacctgg

SEQ ID NO: 24065 - RNA, 20 nt, synthetic construct
  source 1..20: mol_type = other RNA
catgattttttactgaacct

SEQ ID NO: 24066 - RNA, 20 nt, synthetic construct
  source 1..20: mol_type = other RNA
gctattcgcctgcctcagtg

SEQ ID NO: 24067 - RNA, 20 nt, synthetic construct
  source 1..20: mol_type = other RNA
gtgattctcatgcctcagcc

SEQ ID NO: 24068 - RNA, 20 nt, synthetic construct
  source 1..20: mol_type = other RNA
gaccagtctgggccacatgg

SEQ ID NO: 24069 - RNA, 20 nt, synthetic construct
  source 1..20: mol_type = other RNA
atggtgacatatatgtcttg

SEQ ID NO: 24070 - RNA, 20 nt, synthetic construct
  source 1..20: mol_type = other RNA
gcaattctcctgcctcagcc

SEQ ID NO: 24071 - RNA, 20 nt, synthetic construct
  source 1..20: mol_type = other RNA
atcccagctatgcctcttac

SEQ ID NO: 24072 - RNA, 20 nt, synthetic construct
  source 1..20: mol_type = other RNA
agcacttttatctccacaat

SEQ ID NO: 24073 - RNA, 20 nt, synthetic construct
  source 1..20: mol_type = other RNA
aaaatgtgggcgggacacag

SEQ ID NO: 24074 - RNA, 20 nt, synthetic construct
  source 1..20: mol_type = other RNA
ggtccagcgtggttagtgtc

SEQ ID NO: 24075 - RNA, 20 nt, synthetic construct
  source 1..20: mol_type = other RNA
gcgattcttctgcttcagcc

SEQ ID NO: 24076 - RNA, 20 nt, synthetic construct
  source 1..20: mol_type = other RNA
gacctgcctgggcaacatag

SEQ ID NO: 24077 - RNA, 20 nt, synthetic construct
  source 1..20: mol_type = other RNA
cctttctcatccccaaacaa

SEQ ID NO: 24078 - RNA, 20 nt, synthetic construct
  source 1..20: mol_type = other RNA
gacatcttagcttactcctg

SEQ ID NO: 24079 - RNA, 20 nt, synthetic construct
  source 1..20: mol_type = other RNA
gcaattctcccacctcagcc

SEQ ID NO: 24080 - RNA, 20 nt, synthetic construct
  source 1..20: mol_type = other RNA
agcgctcagaaagtattagc

SEQ ID NO: 24081 - RNA, 20 nt, synthetic construct
  source 1..20: mol_type = other RNA
acgattgacccctttctaca

SEQ ID NO: 24082 - RNA, 20 nt, synthetic construct
  source 1..20: mol_type = other RNA
agcaccttcacatacacacc

SEQ ID NO: 24083 - RNA, 20 nt, synthetic construct
  source 1..20: mol_type = other RNA
gcaattctcctgcctcagcc

SEQ ID NO: 24084 - RNA, 20 nt, synthetic construct
  source 1..20: mol_type = other RNA
actgcggacacacgcaaaag

SEQ ID NO: 24085 - RNA, 20 nt, synthetic construct
  source 1..20: mol_type = other RNA
acaggaacctctctgttggc

SEQ ID NO: 24086 - RNA, 20 nt, synthetic construct
  source 1..20: mol_type = other RNA
ggctgcagtgaactatgact

SEQ ID NO: 24087 - RNA, 20 nt, synthetic construct
  source 1..20: mol_type = other RNA
aacattttactttaaaagga

SEQ ID NO: 24088 - RNA, 20 nt, synthetic construct
  source 1..20: mol_type = other RNA
ttctcatttgtcacacactt

SEQ ID NO: 24089 - RNA, 20 nt, synthetic construct
  source 1..20: mol_type = other RNA
atcctggctctgccatttat

SEQ ID NO: 24090 - RNA, 20 nt, synthetic construct
  source 1..20: mol_type = other RNA
gcaattctcatgcctcagcc

SEQ ID NO: 24091 - RNA, 20 nt, synthetic construct
  source 1..20: mol_type = other RNA
tccgtggtgcggcctgtagg

SEQ ID NO: 24092 - RNA, 20 nt, synthetic construct
  source 1..20: mol_type = other RNA
agaccttgccttctagaaac

SEQ ID NO: 24093 - RNA, 20 nt, synthetic construct
  source 1..20: mol_type = other RNA
aggctgcccacacagacaca

SEQ ID NO: 24094 - RNA, 20 nt, synthetic construct
  source 1..20: mol_type = other RNA
ggctgcagtgagttattatt

SEQ ID NO: 24095 - RNA, 20 nt, synthetic construct
  source 1..20: mol_type = other RNA
attttatagaggctgaggtg

SEQ ID NO: 24096 - RNA, 20 nt, synthetic construct
  source 1..20: mol_type = other RNA
atgcttatgaaaattacaca

SEQ ID NO: 24097 - RNA, 20 nt, synthetic construct
  source 1..20: mol_type = other RNA
agtcaaatgcttggcttgga

SEQ ID NO: 24098 - RNA, 20 nt, synthetic construct
  source 1..20: mol_type = other RNA
cagactttgaccctgcctgc

SEQ ID NO: 24099 - RNA, 20 nt, synthetic construct
  source 1..20: mol_type = other RNA
aatctgtactgagcattgat

SEQ ID NO: 24100 - RNA, 20 nt, synthetic construct
  source 1..20: mol_type = other RNA
tcaccaggcactgtactgaa

SEQ ID NO: 24101 - RNA, 20 nt, synthetic construct
  source 1..20: mol_type = other RNA
agaaatctcactgtgaaccc

SEQ ID NO: 24102 - RNA, 20 nt, synthetic construct
  source 1..20: mol_type = other RNA
catatgaagtttgaggagac

SEQ ID NO: 24103 - RNA, 20 nt, synthetic construct
  source 1..20: mol_type = other RNA
acctagacataatgctaagg

SEQ ID NO: 24104 - RNA, 20 nt, synthetic construct
  source 1..20: mol_type = other RNA
gaatgcccgccagcgcgacg

SEQ ID NO: 24105 - RNA, 20 nt, synthetic construct
  source 1..20: mol_type = other RNA
aggcaatcatcattacatgt

SEQ ID NO: 24106 - RNA, 20 nt, synthetic construct
  source 1..20: mol_type = other RNA
ttaagttttggaagcttaaa

SEQ ID NO: 24107 - RNA, 20 nt, synthetic construct
  source 1..20: mol_type = other RNA
ggtacatgatcactaaaagg

SEQ ID NO: 24108 - RNA, 20 nt, synthetic construct
  source 1..20: mol_type = other RNA
aaacagtactttccaaaatg

SEQ ID NO: 24109 - RNA, 20 nt, synthetic construct
  source 1..20: mol_type = other RNA
tagagacgggatttcaccat

SEQ ID NO: 24110 - RNA, 20 nt, synthetic construct
  source 1..20: mol_type = other RNA
gtttactcacgtcatccagc

SEQ ID NO: 24111 - RNA, 20 nt, synthetic construct
  source 1..20: mol_type = other RNA
gaaatttgactttccattct

SEQ ID NO: 24112 - RNA, 20 nt, synthetic construct
  source 1..20: mol_type = other RNA
taagtcaacttcaatgtcgg

SEQ ID NO: 24113 - RNA, 20 nt, synthetic construct
  source 1..20: mol_type = other RNA
acttgtctttcagcaaggac

SEQ ID NO: 24114 - RNA, 20 nt, synthetic construct
  source 1..20: mol_type = other RNA
tgtagtacaagagatagaaa

SEQ ID NO: 24115 - RNA, 20 nt, synthetic construct
  source 1..20: mol_type = other RNA
caaggactggtctttctatc

SEQ ID NO: 24116 - RNA, 20 nt, synthetic construct
  source 1..20: mol_type = other RNA
tgggggtgaattcagtgtag

SEQ ID NO: 24117 - RNA, 20 nt, synthetic construct
  source 1..20: mol_type = other RNA
cagcttacaaaagaatgtaa

SEQ ID NO: 24118 - RNA, 20 nt, synthetic construct
  source 1..20: mol_type = other RNA
ggtagtatggccatagacct

SEQ ID NO: 24119 - RNA, 20 nt, synthetic construct
  source 1..20: mol_type = other RNA
aaaccatgctgtgcatcagt

SEQ ID NO: 24120 - RNA, 20 nt, synthetic construct
  source 1..20: mol_type = other RNA
tgctaaatatacctgaagct

SEQ ID NO: 24121 - RNA, 20 nt, synthetic construct
  source 1..20: mol_type = other RNA
gtatatttagcactgaacga

SEQ ID NO: 24122 - RNA, 20 nt, synthetic construct
  source 1..20: mol_type = other RNA
acagaagagaggagttatac

SEQ ID NO: 24123 - RNA, 20 nt, synthetic construct
  source 1..20: mol_type = other RNA
catcaatgtaccctgggcag

SEQ ID NO: 24124 - RNA, 20 nt, synthetic construct
  source 1..20: mol_type = other RNA
gtcctggctctacaatttac

SEQ ID NO: 24125 - RNA, 20 nt, synthetic construct
  source 1..20: mol_type = other RNA
tacagtaacaggctgtacag

SEQ ID NO: 24126 - RNA, 20 nt, synthetic construct
  source 1..20: mol_type = other RNA
gtttgaagatgccgcatttg

SEQ ID NO: 24127 - RNA, 20 nt, synthetic construct
  source 1..20: mol_type = other RNA
atacttttgctccctcttag

SEQ ID NO: 24128 - RNA, 20 nt, synthetic construct
  source 1..20: mol_type = other RNA
gaccccttcttggacaccaa

SEQ ID NO: 24129 - RNA, 20 nt, synthetic construct
  source 1..20: mol_type = other RNA
caaaccatggatcaaaaaca

SEQ ID NO: 24130 - RNA, 20 nt, synthetic construct
  source 1..20: mol_type = other RNA
caggttgtccaagagggcct

SEQ ID NO: 24131 - RNA, 20 nt, synthetic construct
  source 1..20: mol_type = other RNA
agaggagggaaaatccttga

SEQ ID NO: 24132 - RNA, 20 nt, synthetic construct
  source 1..20: mol_type = other RNA
ctttttctctggctcctcct

SEQ ID NO: 24133 - RNA, 20 nt, synthetic construct
  source 1..20: mol_type = other RNA
aaggagatggaacaaacacc

SEQ ID NO: 24134 - RNA, 20 nt, synthetic construct
  source 1..20: mol_type = other RNA
ggcatcaaatgcattttggc

SEQ ID NO: 24135 - RNA, 20 nt, synthetic construct
  source 1..20: mol_type = other RNA
cccctcccaccccctctttc

SEQ ID NO: 24136 - RNA, 20 nt, synthetic construct
  source 1..20: mol_type = other RNA
tggatggatgcgttgatgag

SEQ ID NO: 24137 - RNA, 20 nt, synthetic construct
  source 1..20: mol_type = other RNA
tttgaagactgccaccctat

SEQ ID NO: 24138 - RNA, 20 nt, synthetic construct
  source 1..20: mol_type = other RNA
aagtccccttcagatattgc

SEQ ID NO: 24139 - RNA, 20 nt, synthetic construct
  source 1..20: mol_type = other RNA
atattgcagtgccttaggtg

SEQ ID NO: 24140 - RNA, 20 nt, synthetic construct
  source 1..20: mol_type = other RNA
atgttgtgacccactgttga

SEQ ID NO: 24141 - RNA, 20 nt, synthetic construct
  source 1..20: mol_type = other RNA
atccagagctgtccagctgt

SEQ ID NO: 24142 - RNA, 20 nt, synthetic construct
  source 1..20: mol_type = other RNA
agatgaagaaactgagattc

SEQ ID NO: 24143 - RNA, 20 nt, synthetic construct
  source 1..20: mol_type = other RNA
agtcactgatctaagggctc

SEQ ID NO: 24144 - RNA, 20 nt, synthetic construct
  source 1..20: mol_type = other RNA
gagaaggaaagaaaggaggc

SEQ ID NO: 24145 - RNA, 20 nt, synthetic construct
  source 1..20: mol_type = other RNA
atccctagggtaagaccggc

SEQ ID NO: 24146 - RNA, 20 nt, synthetic construct
  source 1..20: mol_type = other RNA
cagcacctctcctgacaggg

SEQ ID NO: 24147 - RNA, 20 nt, synthetic construct
  source 1..20: mol_type = other RNA
agcgagactctatttcaaaa

SEQ ID NO: 24148 - RNA, 20 nt, synthetic construct
  source 1..20: mol_type = other RNA
ctgtggcaggtgagggtgtg

SEQ ID NO: 24149 - RNA, 20 nt, synthetic construct
  source 1..20: mol_type = other RNA
gtgccaaagtgcatcctctg

SEQ ID NO: 24150 - RNA, 20 nt, synthetic construct
  source 1..20: mol_type = other RNA
gtcttgtggacaagaactgg

SEQ ID NO: 24151 - RNA, 20 nt, synthetic construct
  source 1..20: mol_type = other RNA
taccaccttcctcatctaca

SEQ ID NO: 24152 - RNA, 20 nt, synthetic construct
  source 1..20: mol_type = other RNA
aagtccccgggtgaggagtg

SEQ ID NO: 24153 - RNA, 20 nt, synthetic construct
  source 1..20: mol_type = other RNA
caaaaatgcatgaggcacac

SEQ ID NO: 24154 - RNA, 20 nt, synthetic construct
  source 1..20: mol_type = other RNA
taccaccttcatcatttttg

SEQ ID NO: 24155 - RNA, 20 nt, synthetic construct
  source 1..20: mol_type = other RNA
cctccagagtagctgggact

SEQ ID NO: 24156 - RNA, 20 nt, synthetic construct
  source 1..20: mol_type = other RNA
ggcaatttggtgtgggagta

SEQ ID NO: 24157 - RNA, 20 nt, synthetic construct
  source 1..20: mol_type = other RNA
aaatgatgatcacaatggaa

SEQ ID NO: 24158 - RNA, 20 nt, synthetic construct
  source 1..20: mol_type = other RNA
tccacagtaaggaagtgaaa

SEQ ID NO: 24159 - RNA, 20 nt, synthetic construct
  source 1..20: mol_type = other RNA
aggtgtggggagggcttaag

SEQ ID NO: 24160 - RNA, 20 nt, synthetic construct
  source 1..20: mol_type = other RNA
aaacagaaatctgaccgctt

SEQ ID NO: 24161 - RNA, 20 nt, synthetic construct
  source 1..20: mol_type = other RNA
aatggtttctctgtttatct

SEQ ID NO: 24162 - RNA, 20 nt, synthetic construct
  source 1..20: mol_type = other RNA
gtcagccaggtgtctggagt

SEQ ID NO: 24163 - RNA, 20 nt, synthetic construct
  source 1..20: mol_type = other RNA
agccggtgccaggtgtctgc

SEQ ID NO: 24164 - RNA, 20 nt, synthetic construct
  source 1..20: mol_type = other RNA
gggcacacccttcccagcca

SEQ ID NO: 24165 - RNA, 20 nt, synthetic construct
  source 1..20: mol_type = other RNA
gggagtctgagaaaagggat

SEQ ID NO: 24166 - RNA, 20 nt, synthetic construct
  source 1..20: mol_type = other RNA
gcctgaatttcctcatctgg

SEQ ID NO: 24167 - RNA, 20 nt, synthetic construct
  source 1..20: mol_type = other RNA
gcctgaaaagggaaagtgac

SEQ ID NO: 24168 - RNA, 20 nt, synthetic construct
  source 1..20: mol_type = other RNA
aggtcttggattcctgctgg

SEQ ID NO: 24169 - RNA, 20 nt, synthetic construct
  source 1..20: mol_type = other RNA
tccggggggatccctccccc

SEQ ID NO: 24170 - RNA, 20 nt, synthetic construct
  source 1..20: mol_type = other RNA
gatgtaggttcccgggctca

SEQ ID NO: 24171 - RNA, 20 nt, synthetic construct
  source 1..20: mol_type = other RNA
aaaggggcattagttaccac

SEQ ID NO: 24172 - RNA, 20 nt, synthetic construct
  source 1..20: mol_type = other RNA
attccttcaatccttctgac

SEQ ID NO: 24173 - RNA, 20 nt, synthetic construct
  source 1..20: mol_type = other RNA
tggcattaaatatttcaaac

SEQ ID NO: 24174 - RNA, 20 nt, synthetic construct
  source 1..20: mol_type = other RNA
tttgggaggatgaaaaagtt

SEQ ID NO: 24175 - RNA, 20 nt, synthetic construct
  source 1..20: mol_type = other RNA
ctgccctctgctgccatgcc

SEQ ID NO: 24176 - RNA, 20 nt, synthetic construct
  source 1..20: mol_type = other RNA
gaaggaaagatataagaatt

SEQ ID NO: 24177 - RNA, 20 nt, synthetic construct
  source 1..20: mol_type = other RNA
gcgattctcctccaccagcc

SEQ ID NO: 24178 - RNA, 20 nt, synthetic construct
  source 1..20: mol_type = other RNA
ggagtctgcagccgggccca

SEQ ID NO: 24179 - RNA, 20 nt, synthetic construct
  source 1..20: mol_type = other RNA
gcaagccacctatcttctct

SEQ ID NO: 24180 - RNA, 20 nt, synthetic construct
  source 1..20: mol_type = other RNA
agggggcatctgtggtgtct

SEQ ID NO: 24181 - RNA, 20 nt, synthetic construct
  source 1..20: mol_type = other RNA
agcaggaaagtggaaaacaa

SEQ ID NO: 24182 - RNA, 20 nt, synthetic construct
  source 1..20: mol_type = other RNA
aaataaaagatacaaaaatt

SEQ ID NO: 24183 - RNA, 20 nt, synthetic construct
  source 1..20: mol_type = other RNA
gtgtatctttctgtttgtat

SEQ ID NO: 24184 - RNA, 20 nt, synthetic construct
  source 1..20: mol_type = other RNA
ctcttgggtctatatatcct

SEQ ID NO: 24185 - RNA, 20 nt, synthetic construct
  source 1..20: mol_type = other RNA
gatatatagacccaagagct

SEQ ID NO: 24186 - RNA, 20 nt, synthetic construct
  source 1..20: mol_type = other RNA
aggtcttcccattattcctc

SEQ ID NO: 24187 - RNA, 20 nt, synthetic construct
  source 1..20: mol_type = other RNA
agcagtgctggaggctttta

SEQ ID NO: 24188 - RNA, 20 nt, synthetic construct
  source 1..20: mol_type = other RNA
tgcctccttagaccctcaaa

SEQ ID NO: 24189 - RNA, 20 nt, synthetic construct
  source 1..20: mol_type = other RNA
gttatccctacctaccaacg

SEQ ID NO: 24190 - RNA, 20 nt, synthetic construct
  source 1..20: mol_type = other RNA
atagtttaagtctgagttag

SEQ ID NO: 24191 - RNA, 20 nt, synthetic construct
  source 1..20: mol_type = other RNA
acacctgtttagtgtctaca

SEQ ID NO: 24192 - RNA, 20 nt, synthetic construct
  source 1..20: mol_type = other RNA
atgaagagacaggctcagag

SEQ ID NO: 24193 - RNA, 20 nt, synthetic construct
  source 1..20: mol_type = other RNA
ctctccctgagggcagggac

SEQ ID NO: 24194 - RNA, 20 nt, synthetic construct
  source 1..20: mol_type = other RNA
gcccaagactctaggtttcc

SEQ ID NO: 24195 - RNA, 20 nt, synthetic construct
  source 1..20: mol_type = other RNA
ctttgacaccctctaatgta

SEQ ID NO: 24196 - RNA, 20 nt, synthetic construct
  source 1..20: mol_type = other RNA
agaggtcaagtgacttggct

SEQ ID NO: 24197 - RNA, 20 nt, synthetic construct
  source 1..20: mol_type = other RNA
atgcaagctcctaaaccaca

SEQ ID NO: 24198 - RNA, 20 nt, synthetic construct
  source 1..20: mol_type = other RNA
cgccccacttcctgcttccc

SEQ ID NO: 24199 - RNA, 20 nt, synthetic construct
  source 1..20: mol_type = other RNA
tcttagggaagcaggaagtg

SEQ ID NO: 24200 - RNA, 20 nt, synthetic construct
  source 1..20: mol_type = other RNA
cacttactgattgccagtcc

SEQ ID NO: 24201 - RNA, 20 nt, synthetic construct
  source 1..20: mol_type = other RNA
ttctgcttcctctagtcatg

SEQ ID NO: 24202 - RNA, 20 nt, synthetic construct
  source 1..20: mol_type = other RNA
ggccagctctcctcttacct

SEQ ID NO: 24203 - RNA, 20 nt, synthetic construct
  source 1..20: mol_type = other RNA
gtccatgtttccatggtata

SEQ ID NO: 24204 - RNA, 20 nt, synthetic construct
  source 1..20: mol_type = other RNA
cagccctgggaaatgaatat

SEQ ID NO: 24205 - RNA, 20 nt, synthetic construct
  source 1..20: mol_type = other RNA
cttggctttccccagcaaga

SEQ ID NO: 24206 - RNA, 20 nt, synthetic construct
  source 1..20: mol_type = other RNA
tgttcttttgggaatactca

SEQ ID NO: 24207 - RNA, 20 nt, synthetic construct
  source 1..20: mol_type = other RNA
gcatgagccaccacgcccca

SEQ ID NO: 24208 - RNA, 20 nt, synthetic construct
  source 1..20: mol_type = other RNA
tttacatattaggaaactga

SEQ ID NO: 24209 - RNA, 20 nt, synthetic construct
  source 1..20: mol_type = other RNA
tcagactgtctgggttcaaa

SEQ ID NO: 24210 - RNA, 20 nt, synthetic construct
  source 1..20: mol_type = other RNA
cacctcttatatgctcagcg

SEQ ID NO: 24211 - RNA, 20 nt, synthetic construct
  source 1..20: mol_type = other RNA
caggctgttgtgtgacatgg

SEQ ID NO: 24212 - RNA, 20 nt, synthetic construct
  source 1..20: mol_type = other RNA
atctgtacattactatctct

SEQ ID NO: 24213 - RNA, 20 nt, synthetic construct
  source 1..20: mol_type = other RNA
acaagggcaggactcttggg

SEQ ID NO: 24214 - RNA, 20 nt, synthetic construct
  source 1..20: mol_type = other RNA
cagttctgtgcttgatccaa

SEQ ID NO: 24215 - RNA, 20 nt, synthetic construct
  source 1..20: mol_type = other RNA
aaattacagaactgagagct

SEQ ID NO: 24216 - RNA, 20 nt, synthetic construct
  source 1..20: mol_type = other RNA
gatgctgcaaaagaatactt

SEQ ID NO: 24217 - RNA, 20 nt, synthetic construct
  source 1..20: mol_type = other RNA
tcttacaaccatcccgtgat

SEQ ID NO: 24218 - RNA, 20 nt, synthetic construct
  source 1..20: mol_type = other RNA
tagatgttaggtactacccc

SEQ ID NO: 24219 - RNA, 20 nt, synthetic construct
  source 1..20: mol_type = other RNA
agtatgtttaggaaaccctg

SEQ ID NO: 24220 - RNA, 20 nt, synthetic construct
  source 1..20: mol_type = other RNA
ttagaccttgttgattgact

SEQ ID NO: 24221 - RNA, 20 nt, synthetic construct
  source 1..20: mol_type = other RNA
taagtttgtggtgggtgggg

SEQ ID NO: 24222 - RNA, 20 nt, synthetic construct
  source 1..20: mol_type = other RNA
ccaccaccagcttctccact

SEQ ID NO: 24223 - RNA, 20 nt, synthetic construct
  source 1..20: mol_type = other RNA
ttcttaaacaggtgaatcgc

SEQ ID NO: 24224 - RNA, 20 nt, synthetic construct
  source 1..20: mol_type = other RNA
tgaaggctgggcgcagcggc

SEQ ID NO: 24225 - RNA, 20 nt, synthetic construct
  source 1..20: mol_type = other RNA
tgaaaaaaaaatctccctcc

SEQ ID NO: 24226 - RNA, 20 nt, synthetic construct
  source 1..20: mol_type = other RNA
cagcttctttattttctttc

SEQ ID NO: 24227 - RNA, 20 nt, synthetic construct
  source 1..20: mol_type = other RNA
catcctttcttttaaggcca

SEQ ID NO: 24228 - RNA, 20 nt, synthetic construct
  source 1..20: mol_type = other RNA
agaagctgcattgcaaaggc

SEQ ID NO: 24229 - RNA, 20 nt, synthetic construct
  source 1..20: mol_type = other RNA
gtctgccggaagctcctctg

SEQ ID NO: 24230 - RNA, 20 nt, synthetic construct
  source 1..20: mol_type = other RNA
gcagctcaacgaggaactgg

SEQ ID NO: 24231 - RNA, 20 nt, synthetic construct
  source 1..20: mol_type = other RNA
tataacgcactggtatctca

SEQ ID NO: 24232 - RNA, 20 nt, synthetic construct
  source 1..20: mol_type = other RNA
gacagagctgaagaaagagc

SEQ ID NO: 24233 - RNA, 20 nt, synthetic construct
  source 1..20: mol_type = other RNA
ctctgtcctgaaatatcttc

SEQ ID NO: 24234 - RNA, 20 nt, synthetic construct
  source 1..20: mol_type = other RNA
gcatgctgggcaggtcagtg

SEQ ID NO: 24235 - RNA, 20 nt, synthetic construct
  source 1..20: mol_type = other RNA
ctgcttgttacccagcagaa

SEQ ID NO: 24236 - RNA, 20 nt, synthetic construct
  source 1..20: mol_type = other RNA
tagagacaagtttaaccatg

SEQ ID NO: 24237 - RNA, 20 nt, synthetic construct
  source 1..20: mol_type = other RNA
tcacccaccactcattcatt

SEQ ID NO: 24238 - RNA, 20 nt, synthetic construct
  source 1..20: mol_type = other RNA
ccacatcttgaagagacctg

SEQ ID NO: 24239 - RNA, 20 nt, synthetic construct
  source 1..20: mol_type = other RNA
gtacctcgcaagcaccttct

SEQ ID NO: 24240 - RNA, 20 nt, synthetic construct
  source 1..20: mol_type = other RNA
gtggggtgaggggcttgggg

SEQ ID NO: 24241 - RNA, 20 nt, synthetic construct
  source 1..20: mol_type = other RNA
caaccagaccaatcttctca

SEQ ID NO: 24242 - RNA, 20 nt, synthetic construct
  source 1..20: mol_type = other RNA
ggacactccaccactgtcag

SEQ ID NO: 24243 - RNA, 20 nt, synthetic construct
  source 1..20: mol_type = other RNA
cttaatcgccagaggattgc

SEQ ID NO: 24244 - RNA, 20 nt, synthetic construct
  source 1..20: mol_type = other RNA
gcagcagaggagaagttcac

SEQ ID NO: 24245 - RNA, 20 nt, synthetic construct
  source 1..20: mol_type = other RNA
ggacttggctttgaaaggct

SEQ ID NO: 24246 - RNA, 20 nt, synthetic construct
  source 1..20: mol_type = other RNA
gtggtacaagcccagctaat

SEQ ID NO: 24247 - RNA, 20 nt, synthetic construct
  source 1..20: mol_type = other RNA
tgcagatatcacctcctcca

SEQ ID NO: 24248 - RNA, 20 nt, synthetic construct
  source 1..20: mol_type = other RNA
tgaggataaggaatgagctg

SEQ ID NO: 24249 - RNA, 20 nt, synthetic construct
  source 1..20: mol_type = other RNA
ttttcaaaccaggatagtcc

SEQ ID NO: 24250 - RNA, 20 nt, synthetic construct
  source 1..20: mol_type = other RNA
tggcacaatcacagctcacc

SEQ ID NO: 24251 - RNA, 20 nt, synthetic construct
  source 1..20: mol_type = other RNA
tgcattttatatataatctc

SEQ ID NO: 24252 - RNA, 20 nt, synthetic construct
  source 1..20: mol_type = other RNA
catcatttttacctctggac

SEQ ID NO: 24253 - RNA, 20 nt, synthetic construct
  source 1..20: mol_type = other RNA
acatttccccttttcagcat

SEQ ID NO: 24254 - RNA, 20 nt, synthetic construct
  source 1..20: mol_type = other RNA
ctgaaaataatttaaggcca

SEQ ID NO: 24255 - RNA, 20 nt, synthetic construct
  source 1..20: mol_type = other RNA
ctgaaaaagcccctagttca

SEQ ID NO: 24256 - RNA, 20 nt, synthetic construct
  source 1..20: mol_type = other RNA
tccccactcacctgttcacc

SEQ ID NO: 24257 - RNA, 20 nt, synthetic construct
  source 1..20: mol_type = other RNA
gatttcagaggccgagaaca

SEQ ID NO: 24258 - RNA, 20 nt, synthetic construct
  source 1..20: mol_type = other RNA
aggccgagaacatttcggaa

SEQ ID NO: 24259 - RNA, 20 nt, synthetic construct
  source 1..20: mol_type = other RNA
gaccccttccccaggctgcg

SEQ ID NO: 24260 - RNA, 20 nt, synthetic construct
  source 1..20: mol_type = other RNA
ccccagggtggggcagagac

SEQ ID NO: 24261 - RNA, 20 nt, synthetic construct
  source 1..20: mol_type = other RNA
ctggggagggattggggagc

SEQ ID NO: 24262 - RNA, 20 nt, synthetic construct
  source 1..20: mol_type = other RNA
acgaggacttcatcacctgg

SEQ ID NO: 24263 - RNA, 20 nt, synthetic construct
  source 1..20: mol_type = other RNA
ctgggggaaggtggctgaga

SEQ ID NO: 24264 - RNA, 20 nt, synthetic construct
  source 1..20: mol_type = other RNA
caggaagggcaggcccagct

SEQ ID NO: 24265 - RNA, 20 nt, synthetic construct
  source 1..20: mol_type = other RNA
acaaggtctcgctctgtcac

SEQ ID NO: 24266 - RNA, 20 nt, synthetic construct
  source 1..20: mol_type = other RNA
taaaaaatcatgttgaactg

SEQ ID NO: 24267 - RNA, 20 nt, synthetic construct
  source 1..20: mol_type = other RNA
cactataatgaaataagtgt

SEQ ID NO: 24268 - RNA, 20 nt, synthetic construct
  source 1..20: mol_type = other RNA
ggctgtggtgattgcttcta

SEQ ID NO: 24269 - RNA, 20 nt, synthetic construct
  source 1..20: mol_type = other RNA
tccaggtagtcgaggctgta

SEQ ID NO: 24270 - RNA, 20 nt, synthetic construct
  source 1..20: mol_type = other RNA
tgtgaatggaaaagtaggtg

SEQ ID NO: 24271 - RNA, 20 nt, synthetic construct
  source 1..20: mol_type = other RNA
tagagacagggcttcgccat

SEQ ID NO: 24272 - RNA, 20 nt, synthetic construct
  source 1..20: mol_type = other RNA
agattgcaaaacccccatct

SEQ ID NO: 24273 - RNA, 20 nt, synthetic construct
  source 1..20: mol_type = other RNA
gctaaatcaactcacatcac

SEQ ID NO: 24274 - RNA, 20 nt, synthetic construct
  source 1..20: mol_type = other RNA
cctcagaactcccttgcagg

SEQ ID NO: 24275 - RNA, 20 nt, synthetic construct
  source 1..20: mol_type = other RNA
ggccatgactttgccatgat

SEQ ID NO: 24276 - RNA, 20 nt, synthetic construct
  source 1..20: mol_type = other RNA
ctgtttactcgacaccaagc

SEQ ID NO: 24277 - RNA, 20 nt, synthetic construct
  source 1..20: mol_type = other RNA
ggctgtggtgattgcttcta

SEQ ID NO: 24278 - RNA, 20 nt, synthetic construct
  source 1..20: mol_type = other RNA
tgtctcccaccccgggctga

SEQ ID NO: 24279 - RNA, 20 nt, synthetic construct
  source 1..20: mol_type = other RNA
cttcttcatctgtaaagtgg

SEQ ID NO: 24280 - RNA, 20 nt, synthetic construct
  source 1..20: mol_type = other RNA
cctaatatagcatttattgg

SEQ ID NO: 24281 - RNA, 20 nt, synthetic construct
  source 1..20: mol_type = other RNA
gtttatcttttattaagtca

SEQ ID NO: 24282 - RNA, 20 nt, synthetic construct
  source 1..20: mol_type = other RNA
tgtccaggaacacctgcaac

SEQ ID NO: 24283 - RNA, 20 nt, synthetic construct
  source 1..20: mol_type = other RNA
ggttggcccctgcccggctg

SEQ ID NO: 24284 - RNA, 20 nt, synthetic construct
  source 1..20: mol_type = other RNA
agaaggcctcggggctcctg

SEQ ID NO: 24285 - RNA, 20 nt, synthetic construct
  source 1..20: mol_type = other RNA
cctcccgagtagctgggact

SEQ ID NO: 24286 - RNA, 20 nt, synthetic construct
  source 1..20: mol_type = other RNA
tggcagctgcttttgtctat

SEQ ID NO: 24287 - RNA, 20 nt, synthetic construct
  source 1..20: mol_type = other RNA
gtgacaccagcccaaccctc

SEQ ID NO: 24288 - RNA, 20 nt, synthetic construct
  source 1..20: mol_type = other RNA
tggaaaattaattgtttggg

SEQ ID NO: 24289 - RNA, 20 nt, synthetic construct
  source 1..20: mol_type = other RNA
ctccagctcaccagccccag

SEQ ID NO: 24290 - RNA, 20 nt, synthetic construct
  source 1..20: mol_type = other RNA
cttgtaaatagctcaggtgt

SEQ ID NO: 24291 - RNA, 20 nt, synthetic construct
  source 1..20: mol_type = other RNA
gggcacttccggcacactgt

SEQ ID NO: 24292 - RNA, 20 nt, synthetic construct
  source 1..20: mol_type = other RNA
atttcgtagcttttctttct

SEQ ID NO: 24293 - RNA, 20 nt, synthetic construct
  source 1..20: mol_type = other RNA
gcctggtttccagcttggcc

SEQ ID NO: 24294 - RNA, 20 nt, synthetic construct
  source 1..20: mol_type = other RNA
gcttttcccaccacacccca

SEQ ID NO: 24295 - RNA, 20 nt, synthetic construct
  source 1..20: mol_type = other RNA
aaaagcatttccagccaggg

SEQ ID NO: 24296 - RNA, 20 nt, synthetic construct
  source 1..20: mol_type = other RNA
caagttggcaaaacagacat

SEQ ID NO: 24297 - RNA, 20 nt, synthetic construct
  source 1..20: mol_type = other RNA
gttactcgttcttcagcaag

SEQ ID NO: 24298 - RNA, 20 nt, synthetic construct
  source 1..20: mol_type = other RNA
gggtgactcagaagaaaaag

SEQ ID NO: 24299 - RNA, 20 nt, synthetic construct
  source 1..20: mol_type = other RNA
gccagctgggtttagcccga

SEQ ID NO: 24300 - RNA, 20 nt, synthetic construct
  source 1..20: mol_type = other RNA
cctgagtctggggctcccag

SEQ ID NO: 24301 - RNA, 20 nt, synthetic construct
  source 1..20: mol_type = other RNA
tgaagtttgcggaaaggata

SEQ ID NO: 24302 - RNA, 20 nt, synthetic construct
  source 1..20: mol_type = other RNA
agaagccaagtaacctgcct

SEQ ID NO: 24303 - RNA, 20 nt, synthetic construct
  source 1..20: mol_type = other RNA
accgtttccatcgttattac

SEQ ID NO: 24304 - RNA, 20 nt, synthetic construct
  source 1..20: mol_type = other RNA
gctgctggccagcaggtgtc

SEQ ID NO: 24305 - RNA, 20 nt, synthetic construct
  source 1..20: mol_type = other RNA
ccgcacagatgctcactgca

SEQ ID NO: 24306 - RNA, 20 nt, synthetic construct
  source 1..20: mol_type = other RNA
actggagatctgcacacaag

SEQ ID NO: 24307 - RNA, 20 nt, synthetic construct
  source 1..20: mol_type = other RNA
gtaacaggcagatacaggaa

SEQ ID NO: 24308 - RNA, 20 nt, synthetic construct
  source 1..20: mol_type = other RNA
gcagaggtcaccaccctctc

SEQ ID NO: 24309 - RNA, 20 nt, synthetic construct
  source 1..20: mol_type = other RNA
cctggggctcttgatgcctt

SEQ ID NO: 24310 - RNA, 20 nt, synthetic construct
  source 1..20: mol_type = other RNA
aaagggggaaaaaaatctag

SEQ ID NO: 24311 - RNA, 20 nt, synthetic construct
  source 1..20: mol_type = other RNA
gatgtggcttaagtaagaag

SEQ ID NO: 24312 - RNA, 20 nt, synthetic construct
  source 1..20: mol_type = other RNA
agcctcacccaccagtgcgc

SEQ ID NO: 24313 - RNA, 20 nt, synthetic construct
  source 1..20: mol_type = other RNA
ctgcccgctgtcctgctcct

SEQ ID NO: 24314 - RNA, 20 nt, synthetic construct
  source 1..20: mol_type = other RNA
aaggcccctagccttgagaa

SEQ ID NO: 24315 - RNA, 20 nt, synthetic construct
  source 1..20: mol_type = other RNA
ggtctgacacgccattgaca

SEQ ID NO: 24316 - RNA, 20 nt, synthetic construct
  source 1..20: mol_type = other RNA
tttttggtcaatccttatga

SEQ ID NO: 24317 - RNA, 20 nt, synthetic construct
  source 1..20: mol_type = other RNA
tttggtgctggtatatctta

SEQ ID NO: 24318 - RNA, 20 nt, synthetic construct
  source 1..20: mol_type = other RNA
tgcatcttatcgagaggcac

SEQ ID NO: 24319 - RNA, 20 nt, synthetic construct
  source 1..20: mol_type = other RNA
atgaggcattcttggcagga

SEQ ID NO: 24320 - RNA, 20 nt, synthetic construct
  source 1..20: mol_type = other RNA
tctgtctttctctcttgtga

SEQ ID NO: 24321 - RNA, 20 nt, synthetic construct
  source 1..20: mol_type = other RNA
tctggatcagctcttcagtc

SEQ ID NO: 24322 - RNA, 20 nt, synthetic construct
  source 1..20: mol_type = other RNA
tatttatttccttagaacaa

SEQ ID NO: 24323 - RNA, 20 nt, synthetic construct
  source 1..20: mol_type = other RNA
gaaaaagttggaagagtgcg

SEQ ID NO: 24324 - RNA, 20 nt, synthetic construct
  source 1..20: mol_type = other RNA
aagttctgggaggaaagcta

SEQ ID NO: 24325 - RNA, 20 nt, synthetic construct
  source 1..20: mol_type = other RNA
ccaagaaacaggcagggtct

SEQ ID NO: 24326 - RNA, 20 nt, synthetic construct
  source 1..20: mol_type = other RNA
ggctaagagagcaggactct

SEQ ID NO: 24327 - RNA, 20 nt, synthetic construct
  source 1..20: mol_type = other RNA
acaggagaaaaccccagtat

SEQ ID NO: 24328 - RNA, 20 nt, synthetic construct
  source 1..20: mol_type = other RNA
ttatctcccaactaggaacc

SEQ ID NO: 24329 - RNA, 20 nt, synthetic construct
  source 1..20: mol_type = other RNA
ctcgctgtgtgccaagagag

SEQ ID NO: 24330 - RNA, 20 nt, synthetic construct
  source 1..20: mol_type = other RNA
ttcctcaaacatttgctgag

SEQ ID NO: 24331 - RNA, 20 nt, synthetic construct
  source 1..20: mol_type = other RNA
tttttagttcagaatatgcc

SEQ ID NO: 24332 - RNA, 20 nt, synthetic construct
  source 1..20: mol_type = other RNA
aatatgccaatgttttcatt

SEQ ID NO: 24333 - RNA, 20 nt, synthetic construct
  source 1..20: mol_type = other RNA
gtgagagagagttggttttt

SEQ ID NO: 24334 - RNA, 20 nt, synthetic construct
  source 1..20: mol_type = other RNA
tacagtgcctggtgattgaa

SEQ ID NO: 24335 - RNA, 20 nt, synthetic construct
  source 1..20: mol_type = other RNA
ttgagctcagtaacatctta

SEQ ID NO: 24336 - RNA, 20 nt, synthetic construct
  source 1..20: mol_type = other RNA
tctgctataacagaacacca

SEQ ID NO: 24337 - RNA, 20 nt, synthetic construct
  source 1..20: mol_type = other RNA
ggtgccccagctcatcagtt

SEQ ID NO: 24338 - RNA, 20 nt, synthetic construct
  source 1..20: mol_type = other RNA
agagggcacttacaggcctc

SEQ ID NO: 24339 - RNA, 20 nt, synthetic construct
  source 1..20: mol_type = other RNA
gggggcccgcctcgccgccc

SEQ ID NO: 24340 - RNA, 20 nt, synthetic construct
  source 1..20: mol_type = other RNA
tctcttttacctccccctat

SEQ ID NO: 24341 - RNA, 20 nt, synthetic construct
  source 1..20: mol_type = other RNA
gtgttccttaactctaggat

SEQ ID NO: 24342 - RNA, 20 nt, synthetic construct
  source 1..20: mol_type = other RNA
catgagaaaattgcatttaa

SEQ ID NO: 24343 - RNA, 20 nt, synthetic construct
  source 1..20: mol_type = other RNA
ggggctagtagcctttcctt

SEQ ID NO: 24344 - RNA, 20 nt, synthetic construct
  source 1..20: mol_type = other RNA
cataatggaaagtatgttct

SEQ ID NO: 24345 - RNA, 20 nt, synthetic construct
  source 1..20: mol_type = other RNA
ccacttaggaacctcagata

SEQ ID NO: 24346 - RNA, 20 nt, synthetic construct
  source 1..20: mol_type = other RNA
ctacacccatctgattttct

SEQ ID NO: 24347 - RNA, 20 nt, synthetic construct
  source 1..20: mol_type = other RNA
gggggctattatgaactgag

SEQ ID NO: 24348 - RNA, 20 nt, synthetic construct
  source 1..20: mol_type = other RNA
ataaaaaaggtctatggcca

SEQ ID NO: 24349 - RNA, 20 nt, synthetic construct
  source 1..20: mol_type = other RNA
ctttcttctgccatttccac

SEQ ID NO: 24350 - RNA, 20 nt, synthetic construct
  source 1..20: mol_type = other RNA
ataatgatactataatagat

SEQ ID NO: 24351 - RNA, 20 nt, synthetic construct
  source 1..20: mol_type = other RNA
gctgaaaccccattcaaatc

SEQ ID NO: 24352 - RNA, 20 nt, synthetic construct
  source 1..20: mol_type = other RNA
ttgggagagcatcaggaagg

SEQ ID NO: 24353 - RNA, 20 nt, synthetic construct
  source 1..20: mol_type = other RNA
atgcttatacacttacactt

SEQ ID NO: 24354 - RNA, 20 nt, synthetic construct
  source 1..20: mol_type = other RNA
gtatctgagcaggttgctcc

SEQ ID NO: 24355 - RNA, 20 nt, synthetic construct
  source 1..20: mol_type = other RNA
gttggataagagaattctct

SEQ ID NO: 24356 - RNA, 20 nt, synthetic construct
  source 1..20: mol_type = other RNA
aaagtaaggcatggttgtgg

SEQ ID NO: 24357 - RNA, 20 nt, synthetic construct
  source 1..20: mol_type = other RNA
gtgttatctcttatatctca

SEQ ID NO: 24358 - RNA, 20 nt, synthetic construct
  source 1..20: mol_type = other RNA
ccatggtttgctgaatccac

SEQ ID NO: 24359 - RNA, 20 nt, synthetic construct
  source 1..20: mol_type = other RNA
taaaagtgatgccaacttac

SEQ ID NO: 24360 - RNA, 20 nt, synthetic construct
  source 1..20: mol_type = other RNA
tatttagtgtgccagaaaca

SEQ ID NO: 24361 - RNA, 20 nt, synthetic construct
  source 1..20: mol_type = other RNA
ccccatccttatttaacact

SEQ ID NO: 24362 - RNA, 20 nt, synthetic construct
  source 1..20: mol_type = other RNA
gccctgaaggctaagttgaa

SEQ ID NO: 24363 - RNA, 20 nt, synthetic construct
  source 1..20: mol_type = other RNA
cttcaacttagccttcaggg

SEQ ID NO: 24364 - RNA, 20 nt, synthetic construct
  source 1..20: mol_type = other RNA
ggtggcacagatgccacctg

SEQ ID NO: 24365 - RNA, 20 nt, synthetic construct
  source 1..20: mol_type = other RNA
gggggttcggaaaaggaaat

SEQ ID NO: 24366 - RNA, 20 nt, synthetic construct
  source 1..20: mol_type = other RNA
aaggtgcaaagaatagaagg

SEQ ID NO: 24367 - RNA, 20 nt, synthetic construct
  source 1..20: mol_type = other RNA
tttttccccacttttttttt

SEQ ID NO: 24368 - RNA, 20 nt, synthetic construct
  source 1..20: mol_type = other RNA
acagagtcttgctctatcgc

SEQ ID NO: 24369 - RNA, 20 nt, synthetic construct
  source 1..20: mol_type = other RNA
gtcaggagttcaagaccagc

SEQ ID NO: 24370 - RNA, 20 nt, synthetic construct
  source 1..20: mol_type = other RNA
cacaatatgtcccaaatacc

SEQ ID NO: 24371 - RNA, 20 nt, synthetic construct
  source 1..20: mol_type = other RNA
gagtgggtagatggatgaat

SEQ ID NO: 24372 - RNA, 20 nt, synthetic construct
  source 1..20: mol_type = other RNA
ttgtttctcaaatatgcaca

SEQ ID NO: 24373 - RNA, 20 nt, synthetic construct
  source 1..20: mol_type = other RNA
tcctctgactctactttgtt

SEQ ID NO: 24374 - RNA, 20 nt, synthetic construct
  source 1..20: mol_type = other RNA
cattcaaatctaaaactcca

SEQ ID NO: 24375 - RNA, 20 nt, synthetic construct
  source 1..20: mol_type = other RNA
tttttgaaatagagtctcgc

SEQ ID NO: 24376 - RNA, 20 nt, synthetic construct
  source 1..20: mol_type = other RNA
accaccaggaggatgggcag

SEQ ID NO: 24377 - RNA, 20 nt, synthetic construct
  source 1..20: mol_type = other RNA
gatccctcacttgtttcttt

SEQ ID NO: 24378 - RNA, 20 nt, synthetic construct
  source 1..20: mol_type = other RNA
ctctcacttctctacctcgc

SEQ ID NO: 24379 - RNA, 20 nt, synthetic construct
  source 1..20: mol_type = other RNA
catcccaggtgatgttcatg

SEQ ID NO: 24380 - RNA, 20 nt, synthetic construct
  source 1..20: mol_type = other RNA
acccagtctgtctgatggct

SEQ ID NO: 24381 - RNA, 20 nt, synthetic construct
  source 1..20: mol_type = other RNA
gatgtctgatgtgtacagaa

SEQ ID NO: 24382 - RNA, 20 nt, synthetic construct
  source 1..20: mol_type = other RNA
gtcagaaggattgaaggaat

SEQ ID NO: 24383 - RNA, 20 nt, synthetic construct
  source 1..20: mol_type = other RNA
agacacttgggttgttccta

SEQ ID NO: 24384 - RNA, 20 nt, synthetic construct
  source 1..20: mol_type = other RNA
tataacaaatgtatcagtct

SEQ ID NO: 24385 - RNA, 20 nt, synthetic construct
  source 1..20: mol_type = other RNA
gcatcattattacccaaggt

SEQ ID NO: 24386 - RNA, 20 nt, synthetic construct
  source 1..20: mol_type = other RNA
tttgcagccaagcccctgtg

SEQ ID NO: 24387 - RNA, 20 nt, synthetic construct
  source 1..20: mol_type = other RNA
ttgtgcccaagagcccaggg

SEQ ID NO: 24388 - RNA, 20 nt, synthetic construct
  source 1..20: mol_type = other RNA
ctttgcttctaatcacggac

SEQ ID NO: 24389 - RNA, 20 nt, synthetic construct
  source 1..20: mol_type = other RNA
actgtacaactggcaaaagt

SEQ ID NO: 24390 - RNA, 20 nt, synthetic construct
  source 1..20: mol_type = other RNA
cctgagtacattaccttagc

SEQ ID NO: 24391 - RNA, 20 nt, synthetic construct
  source 1..20: mol_type = other RNA
ggcaaaaagatcaggaatat

SEQ ID NO: 24392 - RNA, 20 nt, synthetic construct
  source 1..20: mol_type = other RNA
cacccaagaggaagtgctta

SEQ ID NO: 24393 - RNA, 20 nt, synthetic construct
  source 1..20: mol_type = other RNA
gagctctgcttcaaactctg

SEQ ID NO: 24394 - RNA, 20 nt, synthetic construct
  source 1..20: mol_type = other RNA
ggaatccacactttccagtt

SEQ ID NO: 24395 - RNA, 20 nt, synthetic construct
  source 1..20: mol_type = other RNA
ggtgtctgtgtcgggttctg

SEQ ID NO: 24396 - RNA, 20 nt, synthetic construct
  source 1..20: mol_type = other RNA
tgtccttttctgggctcagg

SEQ ID NO: 24397 - RNA, 20 nt, synthetic construct
  source 1..20: mol_type = other RNA
ccaaatgtggccaatttttc

SEQ ID NO: 24398 - RNA, 20 nt, synthetic construct
  source 1..20: mol_type = other RNA
gaatgggttaatccgttcat

SEQ ID NO: 24399 - RNA, 20 nt, synthetic construct
  source 1..20: mol_type = other RNA
tttataagcaatggggagcc

SEQ ID NO: 24400 - RNA, 20 nt, synthetic construct
  source 1..20: mol_type = other RNA
tagattaagggcccctggag

SEQ ID NO: 24401 - RNA, 20 nt, synthetic construct
  source 1..20: mol_type = other RNA
cattcattcattcaacaaac

SEQ ID NO: 24402 - RNA, 20 nt, synthetic construct
  source 1..20: mol_type = other RNA
tgactgcgcttttccttgtc

SEQ ID NO: 24403 - RNA, 20 nt, synthetic construct
  source 1..20: mol_type = other RNA
gggcagtcagacccctctcc

SEQ ID NO: 24404 - RNA, 20 nt, synthetic construct
  source 1..20: mol_type = other RNA
tgtgtgagttggtctctggt

SEQ ID NO: 24405 - RNA, 20 nt, synthetic construct
  source 1..20: mol_type = other RNA
acctgcctggccaacatggt

SEQ ID NO: 24406 - RNA, 20 nt, synthetic construct
  source 1..20: mol_type = other RNA
aaatatttccccccaagatt

SEQ ID NO: 24407 - RNA, 20 nt, synthetic construct
  source 1..20: mol_type = other RNA
tctacaattaatgttgggtt

SEQ ID NO: 24408 - RNA, 20 nt, synthetic construct
  source 1..20: mol_type = other RNA
actcactcactgatttctgg

SEQ ID NO: 24409 - RNA, 20 nt, synthetic construct
  source 1..20: mol_type = other RNA
ctcacatctatgaaatgggg

SEQ ID NO: 24410 - RNA, 20 nt, synthetic construct
  source 1..20: mol_type = other RNA
cagcaactgctctgtgccag

SEQ ID NO: 24411 - RNA, 20 nt, synthetic construct
  source 1..20: mol_type = other RNA
taatgtctgacccccctaaa

SEQ ID NO: 24412 - RNA, 20 nt, synthetic construct
  source 1..20: mol_type = other RNA
ttttgggaaatagggacaga

SEQ ID NO: 24413 - RNA, 20 nt, synthetic construct
  source 1..20: mol_type = other RNA
gttgcaatttaaaaacaaaa

SEQ ID NO: 24414 - RNA, 20 nt, synthetic construct
  source 1..20: mol_type = other RNA
tccagaaatgcacttgggtc

SEQ ID NO: 24415 - RNA, 20 nt, synthetic construct
  source 1..20: mol_type = other RNA
tatgccatcatttcaccatt

SEQ ID NO: 24416 - RNA, 20 nt, synthetic construct
  source 1..20: mol_type = other RNA
gaggatgggagcaatggaaa

SEQ ID NO: 24417 - RNA, 20 nt, synthetic construct
  source 1..20: mol_type = other RNA
cactactcactcaccatggg

SEQ ID NO: 24418 - RNA, 20 nt, synthetic construct
  source 1..20: mol_type = other RNA
ttttttgtagagatggggtc

SEQ ID NO: 24419 - RNA, 20 nt, synthetic construct
  source 1..20: mol_type = other RNA
gtctgcggcccagctcccag

SEQ ID NO: 24420 - RNA, 20 nt, synthetic construct
  source 1..20: mol_type = other RNA
ttcgccactcagagccagcc

SEQ ID NO: 24421 - RNA, 20 nt, synthetic construct
  source 1..20: mol_type = other RNA
tcctactttctcacaactca

SEQ ID NO: 24422 - RNA, 20 nt, synthetic construct
  source 1..20: mol_type = other RNA
tacagaacaagttaactgtc

SEQ ID NO: 24423 - RNA, 20 nt, synthetic construct
  source 1..20: mol_type = other RNA
tagactgtcagctcatgagg

SEQ ID NO: 24424 - RNA, 20 nt, synthetic construct
  source 1..20: mol_type = other RNA
gtgcagctaggatgaaaaag

SEQ ID NO: 24425 - RNA, 20 nt, synthetic construct
  source 1..20: mol_type = other RNA
tatctgtctatcttcccccc

SEQ ID NO: 24426 - RNA, 20 nt, synthetic construct
  source 1..20: mol_type = other RNA
ctcctcaaatatttcacccc

SEQ ID NO: 24427 - RNA, 20 nt, synthetic construct
  source 1..20: mol_type = other RNA
aaacattaaaaaacagtaac

SEQ ID NO: 24428 - RNA, 20 nt, synthetic construct
  source 1..20: mol_type = other RNA
ccaggctgtgtgaccctgtg

SEQ ID NO: 24429 - RNA, 20 nt, synthetic construct
  source 1..20: mol_type = other RNA
cgcctagtgcctcagtttcc

SEQ ID NO: 24430 - RNA, 20 nt, synthetic construct
  source 1..20: mol_type = other RNA
taaattaataaatggttggg

SEQ ID NO: 24431 - RNA, 20 nt, synthetic construct
  source 1..20: mol_type = other RNA
aaatcctaatctatctctcc

SEQ ID NO: 24432 - RNA, 20 nt, synthetic construct
  source 1..20: mol_type = other RNA
aataatgctttattgataaa

SEQ ID NO: 24433 - RNA, 20 nt, synthetic construct
  source 1..20: mol_type = other RNA
cctcctgtatcttatccatc

SEQ ID NO: 24434 - RNA, 20 nt, synthetic construct
  source 1..20: mol_type = other RNA
atcctctaggttcagtaaaa

SEQ ID NO: 24435 - RNA, 20 nt, synthetic construct
  source 1..20: mol_type = other RNA
ctgatttacacttttctttt

SEQ ID NO: 24436 - RNA, 20 nt, synthetic construct
  source 1..20: mol_type = other RNA
ttagcctgaatccacttggc

SEQ ID NO: 24437 - RNA, 20 nt, synthetic construct
  source 1..20: mol_type = other RNA
tcatttactcctccccacaa

SEQ ID NO: 24438 - RNA, 20 nt, synthetic construct
  source 1..20: mol_type = other RNA
tccttcccccagggatagtg

SEQ ID NO: 24439 - RNA, 20 nt, synthetic construct
  source 1..20: mol_type = other RNA
tagtttaagcctcacaaaac

SEQ ID NO: 24440 - RNA, 20 nt, synthetic construct
  source 1..20: mol_type = other RNA
agcacccttcccaggtgtca

SEQ ID NO: 24441 - RNA, 20 nt, synthetic construct
  source 1..20: mol_type = other RNA
gatctttgcagacaggcaag

SEQ ID NO: 24442 - RNA, 20 nt, synthetic construct
  source 1..20: mol_type = other RNA
ttcaaagcaccttcacatac

SEQ ID NO: 24443 - RNA, 20 nt, synthetic construct
  source 1..20: mol_type = other RNA
gtgagttgagccttcaggcc

SEQ ID NO: 24444 - RNA, 20 nt, synthetic construct
  source 1..20: mol_type = other RNA
ccaagctggtcccactcagt

SEQ ID NO: 24445 - RNA, 20 nt, synthetic construct
  source 1..20: mol_type = other RNA
ctctaatagccaaagtgtgt

SEQ ID NO: 24446 - RNA, 20 nt, synthetic construct
  source 1..20: mol_type = other RNA
gtattttttagtagagatgg

SEQ ID NO: 24447 - RNA, 20 nt, synthetic construct
  source 1..20: mol_type = other RNA
gccttagaagaaacttgttc

SEQ ID NO: 24448 - RNA, 20 nt, synthetic construct
  source 1..20: mol_type = other RNA
tttttggtacatggagaaag

SEQ ID NO: 24449 - RNA, 20 nt, synthetic construct
  source 1..20: mol_type = other RNA
acccttggcctgtataactg

SEQ ID NO: 24450 - RNA, 20 nt, synthetic construct
  source 1..20: mol_type = other RNA
cagttggtgaaggtggtgtc

SEQ ID NO: 24451 - RNA, 20 nt, synthetic construct
  source 1..20: mol_type = other RNA
acactatacaatcctatgac

SEQ ID NO: 24452 - RNA, 20 nt, synthetic construct
  source 1..20: mol_type = other RNA
gtggtaaagagataaaataa

SEQ ID NO: 24453 - RNA, 20 nt, synthetic construct
  source 1..20: mol_type = other RNA
tgtatcgcactcctgtgtct

SEQ ID NO: 24454 - RNA, 20 nt, synthetic construct
  source 1..20: mol_type = other RNA
agaaggatctggagaaaagc

SEQ ID NO: 24455 - RNA, 35 nt, synthetic construct
  source 1..35: mol_type = other RNA
gtcaaaagacctttttaatttctactcttgtagat

SEQ ID NO: 24456 - RNA, 35 nt, synthetic construct
  source 1..35: mol_type = other RNA
gtcaaaagacctttggaatttctactcttgtagat

SEQ ID NO: 24457 - RNA, 21 nt, synthetic construct
  source 1..21: mol_type = other RNA
ggaatttctactcttgtagat